United States Patent Application Publication US 2012/0264634 A1 - sequence listing, part 2

SEQ ID NO: 812 - DNA, 1392 bp, Homo Sapiens
  misc_feature (1)..(1): n is a, c, g, or t
  misc_feature (859)..(859): n is a, c, g, or t
  misc_feature (868)..(868): n is a, c, g, or t
  misc_feature (875)..(875): n is a, c, g, or t
  misc_feature (886)..(886): n is a, c, g, or t
  misc_feature (908)..(908): n is a, c, g, or t
  misc_feature (937)..(937): n is a, c, g, or t
  misc_feature (946)..(946): n is a, c, g, or t
  misc_feature (950)..(950): n is a, c, g, or t
  misc_feature (964)..(965): n is a, c, g, or t
  misc_feature (988)..(988): n is a, c, g, or t
  misc_feature (991)..(991): n is a, c, g, or t
  misc_feature (1009)..(1009): n is a, c, g, or t
  misc_feature (1022)..(1022): n is a, c, g, or t
  misc_feature (1033)..(1033): n is a, c, g, or t
  misc_feature (1040)..(1040): n is a, c, g, or t
  misc_feature (1044)..(1044): n is a, c, g, or t
  misc_feature (1046)..(1046): n is a, c, g, or t
  misc_feature (1061)..(1061): n is a, c, g, or t
  misc_feature (1067)..(1067): n is a, c, g, or t
  misc_feature (1081)..(1082): n is a, c, g, or t
  misc_feature (1087)..(1088): n is a, c, g, or t
  misc_feature (1093)..(1093): n is a, c, g, or t
  misc_feature (1095)..(1095): n is a, c, g, or t
  misc_feature (1097)..(1097): n is a, c, g, or t
  misc_feature (1100)..(1100): n is a, c, g, or t
  misc_feature (1105)..(1105): n is a, c, g, or t
  misc_feature (1111)..(1111): n is a, c, g, or t
  misc_feature (1114)..(1114): n is a, c, g, or t
  misc_feature (1120)..(1120): n is a, c, g, or t
  misc_feature (1124)..(1124): n is a, c, g, or t
  misc_feature (1128)..(1128): n is a, c, g, or t
  misc_feature (1132)..(1132): n is a, c, g, or t
  misc_feature (1136)..(1136): n is a, c, g, or t
  misc_feature (1142)..(1143): n is a, c, g, or t
  misc_feature (1148)..(1148): n is a, c, g, or t
  misc_feature (1157)..(1157): n is a, c, g, or t
  misc_feature (1162)..(1162): n is a, c, g, or t
  misc_feature (1168)..(1168): n is a, c, g, or t
  misc_feature (1171)..(1171): n is a, c, g, or t
  misc_feature (1188)..(1188): n is a, c, g, or t
  misc_feature (1192)..(1192): n is a, c, g, or t
  misc_feature (1196)..(1196): n is a, c, g, or t
  misc_feature (1210)..(1210): n is a, c, g, or t
  misc_feature (1219)..(1221): n is a, c, g, or t
  misc_feature (1225)..(1225): n is a, c, g, or t
  misc_feature (1247)..(1247): n is a, c, g, or t
  misc_feature (1253)..(1254): n is a, c, g, or t
  misc_feature (1260)..(1262): n is a, c, g, or t
  misc_feature (1264)..(1265): n is a, c, g, or t
  misc_feature (1273)..(1273): n is a, c, g, or t
  misc_feature (1278)..(1278): n is a, c, g, or t
  misc_feature (1285)..(1289): n is a, c, g, or t
  misc_feature (1295)..(1295): n is a, c, g, or t
  misc_feature (1299)..(1299): n is a, c, g, or t
  misc_feature (1304)..(1304): n is a, c, g, or t
  misc_feature (1307)..(1307): n is a, c, g, or t
  misc_feature (1311)..(1311): n is a, c, g, or t
  misc_feature (1315)..(1317): n is a, c, g, or t
  misc_feature (1319)..(1319): n is a, c, g, or t
  misc_feature (1321)..(1322): n is a, c, g, or t
  misc_feature (1332)..(1334): n is a, c, g, or t
  misc_feature (1336)..(1341): n is a, c, g, or t
  misc_feature (1346)..(1346): n is a, c, g, or t
  misc_feature (1348)..(1348): n is a, c, g, or t
  misc_feature (1351)..(1351): n is a, c, g, or t
  misc_feature (1353)..(1353): n is a, c, g, or t
  misc_feature (1358)..(1359): n is a, c, g, or t
  misc_feature (1365)..(1367): n is a, c, g, or t
  misc_feature (1370)..(1376): n is a, c, g, or t
  misc_feature (1378)..(1378): n is a, c, g, or t
  misc_feature (1380)..(1382): n is a, c, g, or t
  misc_feature (1384)..(1384): n is a, c, g, or t
  misc_feature (1386)..(1387): n is a, c, g, or t
  misc_feature (1391)..(1392): n is a, c, g, or t
nttagagaaaattactatgagaggatcgcatcaccatcaccatcacggatcctatttaggtgacactatagaatcgtcgacccacgcgtccgcccacgcgtccgcagagcatcatcagcaccgtgggccaagctttcgagctgcgcttcaagcagtacctgcacagcccgcccaaggtggcgctgcccccagaaaggctggcagggccggaggagtcggcctggggggacgaggaggactctttggagcacaattactacaacagcatcccggggaaggagccgccgctgggcgggctagtggactccaggctggccctgacacagccctgcgccctcacggccctcgaccagggcccatctccttctctaagagatgcctgcagcctgccatgggacgtggggtccaccggtacaggaccagtggcccagcccccctacccgccgggcccctgtggcccccacggaggaacagctgcgtcaggagccctggtaccacggccggatgagccgccgggcggcagagaggatgcttcgagctgacggggacttccttgtgcgagacagcgtcaccaaccccgggcagtatgtcctcaccggcatgcacgccgggcagcccaagcacctgctgctcgtggaccccgagggcgtggtacggacgaaggacgtgctgtttgagagcatcagccacctgatcgaccaccacctgcagaacgggcagcccatcgtggccgccgagagtgagctgcacctgcgtggcgtggtctcacgggagccctgagccaggtgaccgttctcagccctggctcctgcctgttctcagccccagctcctgcctgtcatggccttggggctctcanccctcctcntggatcntggtcaggccnaaacaccgctgcctctcctttnttcgcatgaacctctggcatggtctttcntcaactggncccngggctgggcaaaannttcttcttgccggggccccttgnccnaccccctcttttgcctgnagtgagggtgttnatacaaaaaanggaaacntttncnccttttaaaaaaaanaattcnaaaaacaacccctnncttcnnaaccntngnccnggggntccccntcncccctnggtnggtncggncaancccccnnaaaantaaaattcnaaaanctgggnaanaaagggaattccgggcngggngggnttttttttcccctnaaaaagggnnncaantttttttaaggggaaccttaangttttnnggtttnnngnnaaaaaatnttggntaaaatnnnnnctttantccntgaanttngggnaacnnntntnnaaaaggaatnnnannnnnngcccntntcntnaaaannaaaaannnttnnnnnnntncnnnantnncccnn

SEQ ID NO: 813 - DNA, 1400 bp, Homo Sapiens
  misc_feature (818)..(818): n is a, c, g, or t
  misc_feature (841)..(841): n is a, c, g, or t
  misc_feature (849)..(849): n is a, c, g, or t
  misc_feature (861)..(861): n is a, c, g, or t
  misc_feature (877)..(877): n is a, c, g, or t
  misc_feature (879)..(879): n is a, c, g, or t
  misc_feature (893)..(893): n is a, c, g, or t
  misc_feature (904)..(904): n is a, c, g, or t
  misc_feature (910)..(910): n is a, c, g, or t
  misc_feature (916)..(916): n is a, c, g, or t
  misc_feature (928)..(928): n is a, c, g, or t
  misc_feature (949)..(949): n is a, c, g, or t
  misc_feature (964)..(964): n is a, c, g, or t
  misc_feature (975)..(975): n is a, c, g, or t
  misc_feature (981)..(981): n is a, c, g, or t
  misc_feature (1005)..(1005): n is a, c, g, or t
  misc_feature (1023)..(1024): n is a, c, g, or t
  misc_feature (1031)..(1031): n is a, c, g, or t
  misc_feature (1033)..(1033): n is a, c, g, or t
  misc_feature (1035)..(1035): n is a, c, g, or t
  misc_feature (1046)..(1046): n is a, c, g, or t
  misc_feature (1049)..(1049): n is a, c, g, or t
  misc_feature (1055)..(1055): n is a, c, g, or t
  misc_feature (1058)..(1058): n is a, c, g, or t
  misc_feature (1060)..(1061): n is a, c, g, or t
  misc_feature (1068)..(1069): n is a, c, g, or t
  misc_feature (1077)..(1077): n is a, c, g, or t
  misc_feature (1092)..(1092): n is a, c, g, or t
  misc_feature (1094)..(1095): n is a, c, g, or t
  misc_feature (1097)..(1097): n is a, c, g, or t
  misc_feature (1101)..(1103): n is a, c, g, or t
  misc_feature (1106)..(1107): n is a, c, g, or t
  misc_feature (1111)..(1112): n is a, c, g, or t
  misc_feature (1115)..(1115): n is a, c, g, or t
  misc_feature (1118)..(1119): n is a, c, g, or t
  misc_feature (1127)..(1127): n is a, c, g, or t
  misc_feature (1144)..(1144): n is a, c, g, or t
  misc_feature (1152)..(1152): n is a, c, g, or t
  misc_feature (1162)..(1162): n is a, c, g, or t
  misc_feature (1165)..(1165): n is a, c, g, or t
  misc_feature (1176)..(1176): n is a, c, g, or t
  misc_feature (1181)..(1181): n is a, c, g, or t
  misc_feature (1187)..(1187): n is a, c, g, or t
  misc_feature (1190)..(1190): n is a, c, g, or t
  misc_feature (1193)..(1193): n is a, c, g, or t
  misc_feature (1196)..(1196): n is a, c, g, or t
  misc_feature (1200)..(1200): n is a, c, g, or t
  misc_feature (1205)..(1205): n is a, c, g, or t
  misc_feature (1209)..(1209): n is a, c, g, or t
  misc_feature (1215)..(1215): n is a, c, g, or t
  misc_feature (1217)..(1217): n is a, c, g, or t
  misc_feature (1227)..(1227): n is a, c, g, or t
  misc_feature (1232)..(1232): n is a, c, g, or t
  misc_feature (1242)..(1242): n is a, c, g, or t
  misc_feature (1247)..(1247): n is a, c, g, or t
  misc_feature (1257)..(1259): n is a, c, g, or t
  misc_feature (1273)..(1273): n is a, c, g, or t
  misc_feature (1280)..(1280): n is a, c, g, or t
  misc_feature (1284)..(1284): n is a, c, g, or t
  misc_feature (1286)..(1287): n is a, c, g, or t
  misc_feature (1289)..(1289): n is a, c, g, or t
  misc_feature (1296)..(1296): n is a, c, g, or t
  misc_feature (1298)..(1298): n is a, c, g, or t
  misc_feature (1300)..(1300): n is a, c, g, or t
  misc_feature (1302)..(1303): n is a, c, g, or t
  misc_feature (1305)..(1305): n is a, c, g, or t
  misc_feature (1317)..(1320): n is a, c, g, or t
  misc_feature (1334)..(1334): n is a, c, g, or t
  misc_feature (1340)..(1341): n is a, c, g, or t
  misc_feature (1345)..(1345): n is a, c, g, or t
  misc_feature (1349)..(1349): n is a, c, g, or t
  misc_feature (1353)..(1353): n is a, c, g, or t
  misc_feature (1356)..(1356): n is a, c, g, or t
  misc_feature (1362)..(1362): n is a, c, g, or t
  misc_feature (1364)..(1364): n is a, c, g, or t
  misc_feature (1366)..(1366): n is a, c, g, or t
  misc_feature (1373)..(1374): n is a, c, g, or t
  misc_feature (1376)..(1376): n is a, c, g, or t
  misc_feature (1378)..(1378): n is a, c, g, or t
  misc_feature (1385)..(1385): n is a, c, g, or t
  misc_feature (1395)..(1395): n is a, c, g, or t
  misc_feature (1400)..(1400): n is a, c, g, or t
tagagaaattactatgagaggatcgcatcaccatcaccatcacggatcctatttaggtgacactatagaatcgtcgacccacgcgtccgaagaagaccaagacccatcatgccccaggctcagcagggagctgctggatgagaaagagcctgaagtcttgcaggactcactggatagatgttattcgactccttcaggttatcttgaactgcctgacttaggccagccctacagcagtgctgtttactcattggaggaacagtaccttggcttggctcttgacgtggacagaattaaaaaggaccaagaagaggaagaagaccaaggcccaccatgccccaggctcagcagggagctgctggaggtagtagagcctgaagtcttgcaggactcactggatagatgttattcaactccttccagttgtcttgaacagcctgactcctgccagccctatggaagttccttttatgcattggaggaaaaacatgttggcttttctcttgacgtgggagaaattgaaaagaaggggaaggggaagaaaagaaggggaagaagatcaaagaaggaaagaagaaggggaagaaaagaaggggaagaagatcaaaacccaccatgccccaggctcagcagggagctgctggatgagaaagggcctgaagtcttgcaggactcactggatagatgttattcaactccttcaggttgtcttgaactgactgactcatgccagccctacagaagtgccttttatgtattggagcaacagcgtgttggcttggctgttgacatggatgaaattgaaaagtacaaagaantggaagaagaccaagacccatcntggcccangctcagcagganctgctggatgaaaaanancctgaagtcttgcnggactcactgnatatangttatncgactccctcangttatcttgaactgcccggancttaagccaaccccnacagccagggnctgttnactccttggaagggaaaattaccnttgggcttggcttctggnnggggacngnanttaaaaagganccntaaacnggnannaacaccnntgtccccnccatgcccccaggcntnntngggnnnctnntggnnagnaannaaaacccngaaatttttgccgggancccccggnaaaaaggttnttnacccccttccnattgnctaaanaanccnacntccnccccncccntggaantncttttttctnttggnagaaaaccgnggggnttttcctttnnngggaaaatttcccncaaaaanaaantnnanccccccntntncnngnaaaaataaaaannnngggggccccccccngggggnnaaanctantccnggngggccncntnaaaaaannancnaaacccnggttttaaanggggn

SEQ ID NO: 814 - DNA, 1351 bp, Homo Sapiens
  misc_feature (2)..(2): n is a, c, g, or t
  misc_feature (860)..(860): n is a, c, g, or t
  misc_feature (915)..(915): n is a, c, g, or t
  misc_feature (923)..(923): n is a, c, g, or t
  misc_feature (945)..(945): n is a, c, g, or t
  misc_feature (958)..(958): n is a, c, g, or t
  misc_feature (965)..(965): n is a, c, g, or t
  misc_feature (977)..(977): n is a, c, g, or t
  misc_feature (992)..(992): n is a, c, g, or t
  misc_feature (1024)..(1025): n is a, c, g, or t
  misc_feature (1028)..(1028): n is a, c, g, or t
  misc_feature (1038)..(1038): n is a, c, g, or t
  misc_feature (1058)..(1058): n is a, c, g, or t
  misc_feature (1066)..(1066): n is a, c, g, or t
  misc_feature (1072)..(1072): n is a, c, g, or t
  misc_feature (1074)..(1074): n is a, c, g, or t
  misc_feature (1076)..(1077): n is a, c, g, or t
  misc_feature (1084)..(1084): n is a, c, g, or t
  misc_feature (1087)..(1088): n is a, c, g, or t
  misc_feature (1091)..(1091): n is a, c, g, or t
  misc_feature (1099)..(1099): n is a, c, g, or t
  misc_feature (1103)..(1103): n is a, c, g, or t
  misc_feature (1120)..(1121): n is a, c, g, or t
  misc_feature (1123)..(1123): n is a, c, g, or t
  misc_feature (1131)..(1131): n is a, c, g, or t
  misc_feature (1133)..(1133): n is a, c, g, or t
  misc_feature (1137)..(1137): n is a, c, g, or t
  misc_feature (1146)..(1146): n is a, c, g, or t
  misc_feature (1150)..(1150): n is a, c, g, or t
  misc_feature (1155)..(1155): n is a, c, g, or t
  misc_feature (1166)..(1166): n is a, c, g, or t
  misc_feature (1168)..(1168): n is a, c, g, or t
  misc_feature (1170)..(1170): n is a, c, g, or t
  misc_feature (1177)..(1177): n is a, c, g, or t
  misc_feature (1183)..(1184): n is a, c, g, or t
  misc_feature (1187)..(1187): n is a, c, g, or t
  misc_feature (1191)..(1191): n is a, c, g, or t
  misc_feature (1201)..(1203): n is a, c, g, or t
  misc_feature (1205)..(1205): n is a, c, g, or t
  misc_feature (1207)..(1207): n is a, c, g, or t
  misc_feature (1212)..(1212): n is a, c, g, or t
  misc_feature (1218)..(1219): n is a, c, g, or t
  misc_feature (1226)..(1226): n is a, c, g, or t
  misc_feature (1232)..(1232): n is a, c, g, or t
  misc_feature (1234)..(1234): n is a, c, g, or t
  misc_feature (1237)..(1237): n is a, c, g, or t
  misc_feature (1240)..(1240): n is a, c, g, or t
  misc_feature (1245)..(1245): n is a, c, g, or t
  misc_feature (1249)..(1249): n is a, c, g, or t
  misc_feature (1255)..(1258): n is a, c, g, or t
  misc_feature (1263)..(1263): n is a, c, g, or t
  misc_feature (1290)..(1291): n is a, c, g, or t
  misc_feature (1305)..(1305): n is a, c, g, or t
  misc_feature (1315)..(1315): n is a, c, g, or t
  misc_feature (1339)..(1339): n is a, c, g, or t
  misc_feature (1344)..(1344): n is a, c, g, or t
  misc_feature (1347)..(1347): n is a, c, g, or t
  misc_feature (1351)..(1351): n is a, c, g, or t
cnattagagagattactatgagaggatcgcatcaccatcaccatcacggatcctatttaggtgacactatagaatcgtcgacccacgcgtccgaccagccaatagtggagacctattatgggccagggagactctataccctgatcaaatatctgcaggtggaatgtgacagacaggtggagaaggtggtagacaagttcatcaagcaaagggactaccaccagcagttccggcatgttcagaacaacctgatgagaaattctacaacagaaaaaatcgaaccaagagaactggaccccatcctgactgaggtcaccctgatgaatgcccgcagtgagctatacttacgcttcctcaagaagaggattagctctgattttgaggtgggagactccatggcctcagaggaagtaaagcaagagcaccagaagtgtctggacaaactcctcaataactgccttttgagctgtaccatgcaggagctaattggcttatatgttaccatggaggagtacttcatgagggagactgtcaataaggctgtggctctggacacctatgagaagggccagctgacatccagcatggtggatgatgtcttctacattgttaagaagtgcattgggcgggctctgtccagctccagcattgactgtctctgtgccatgatcaacctcgccaccacagagctggagtctgacttcagggatgttctgtgtaataagctgcggatgggctttcctgccaccaccttccaggacatccagcgcggggtgacaagtgccgtgaacatcatgcacagcagcctccagcaaggcaaatttgacacaaaaggcatcgagagtactgacgaggcgaanatgtccttcctggtgactctgaacaacgtggaagtctgcagtgaaaacatctccnctctgaanaaaacactggagagtgactgcnccaagctcttcanccagggnattggaggggancaggcccaggccaantttgacagctgcctttctgacttggcccccgnntcnacaaattccnaaacctcttgcaggaagggntgaagganctcaanancnnagccttnaannccnaggggcgncctnggatcacagcttttttnncngctccccnanttcnggggggaanaatntttgnctttgaggccncnanccttggntaaaannttnttcntttctggggnnncnanggggnaatttnnggcgccntttccngnttnttnaaaancaancggccnnnnaaaancttttttccccaattgaaaaagggggnnaaacccctttcccnggggggcccnttttaaaaaaaaggcctttttttnttccnggncccn

SEQ ID NO: 815 - DNA, 1392 bp, Homo Sapiens
  misc_feature (1)..(1): n is a, c, g, or t
  misc_feature (861)..(861): n is a, c, g, or t
  misc_feature (890)..(890): n is a, c, g, or t
  misc_feature (896)..(896): n is a, c, g, or t
  misc_feature (902)..(902): n is a, c, g, or t
  misc_feature (928)..(928): n is a, c, g, or t
  misc_feature (932)..(932): n is a, c, g, or t
  misc_feature (938)..(938): n is a, c, g, or t
  misc_feature (951)..(952): n is a, c, g, or t
  misc_feature (968)..(968): n is a, c, g, or t
  misc_feature (977)..(977): n is a, c, g, or t
  misc_feature (989)..(989): n is a, c, g, or t
  misc_feature (994)..(995): n is a, c, g, or t
  misc_feature (1008)..(1008): n is a, c, g, or t
  misc_feature (1027)..(1027): n is a, c, g, or t
  misc_feature (1029)..(1029): n is a, c, g, or t
  misc_feature (1040)..(1040): n is a, c, g, or t
  misc_feature (1043)..(1043): n is a, c, g, or t
  misc_feature (1047)..(1047): n is a, c, g, or t
  misc_feature (1059)..(1059): n is a, c, g, or t
  misc_feature (1061)..(1061): n is a, c, g, or t
  misc_feature (1066)..(1066): n is a, c, g, or t
  misc_feature (1078)..(1079): n is a, c, g, or t
  misc_feature (1088)..(1088): n is a, c, g, or t
  misc_feature (1095)..(1095): n is a, c, g, or t
  misc_feature (1103)..(1103): n is a, c, g, or t
  misc_feature (1118)..(1118): n is a, c, g, or t
  misc_feature (1120)..(1120): n is a, c, g, or t
  misc_feature (1138)..(1138): n is a, c, g, or t
  misc_feature (1144)..(1144): n is a, c, g, or t
  misc_feature (1146)..(1146): n is a, c, g, or t
  misc_feature (1148)..(1148): n is a, c, g, or t
  misc_feature (1157)..(1157): n is a, c, g, or t
  misc_feature (1160)..(1162): n is a, c, g, or t
  misc_feature (1170)..(1170): n is a, c, g, or t
  misc_feature (1176)..(1176): n is a, c, g, or t
  misc_feature (1178)..(1178): n is a, c, g, or t
  misc_feature (1181)..(1181): n is a, c, g, or t
  misc_feature (1185)..(1185): n is a, c, g, or t
  misc_feature (1195)..(1196): n is a, c, g, or t
  misc_feature (1198)..(1198): n is a, c, g, or t
  misc_feature (1203)..(1203): n is a, c, g, or t
  misc_feature (1209)..(1209): n is a, c, g, or t
  misc_feature (1228)..(1228): n is a, c, g, or t
  misc_feature (1245)..(1245): n is a, c, g, or t
  misc_feature (1248)..(1248): n is a, c, g, or t
  misc_feature (1254)..(1254): n is a, c, g, or t
  misc_feature (1257)..(1257): n is a, c, g, or t
  misc_feature (1262)..(1264): n is a, c, g, or t
  misc_feature (1273)..(1273): n is a, c, g, or t
  misc_feature (1275)..(1275): n is a, c, g, or t
  misc_feature (1280)..(1282): n is a, c, g, or t
  misc_feature (1285)..(1285): n is a, c, g, or t
  misc_feature (1288)..(1288): n is a, c, g, or t
  misc_feature (1292)..(1292): n is a, c, g, or t
  misc_feature (1294)..(1294): n is a, c, g, or t
  misc_feature (1302)..(1302): n is a, c, g, or t
  misc_feature (1304)..(1304): n is a, c, g, or t
  misc_feature (1309)..(1309): n is a, c, g, or t
  misc_feature (1313)..(1313): n is a, c, g, or t
  misc_feature (1318)..(1318): n is a, c, g, or t
  misc_feature (1323)..(1323): n is a, c, g, or t
  misc_feature (1331)..(1331): n is a, c, g, or t
  misc_feature (1340)..(1340): n is a, c, g, or t
  misc_feature (1352)..(1352): n is a, c, g, or t
  misc_feature (1356)..(1356): n is a, c, g, or t
  misc_feature (1358)..(1358): n is a, c, g, or t
  misc_feature (1363)..(1363): n is a, c, g, or t
  misc_feature (1365)..(1365): n is a, c, g, or t
  misc_feature (1371)..(1371): n is a, c, g, or t
  misc_feature (1389)..(1390): n is a, c, g, or t
  misc_feature (1392)..(1392): n is a, c, g, or t
naatagagagaattactatgagaggatcgcatcaccatcaccatcacggatcctatttaggtgacactatagaatcgtcgacccacgcgtccgagaaacttgagccggctgccccgcccacggtgcccgaagccccaaaggctggaattaggggctagaagtctggcacccaccgcctggccaggtgttcgggacgcgaccaggtgggcggtcgccccgccccgggagcgcggcttaatagctgagagcccgggggccaggccgcggctgcggcccaggcaacgccctgagggtggccacgctgccaggtgttccactcccccgggactatgggcaagggcccggggcggggagggcggcaggtgctgacactggagctgcgccggaggtcggggaactcggcctcctaagactgaggacactcgcctgctgggccggtcgagctgtgcggtgccctccgggacgcagggggcgctgcagccacgctgggtcaggctccgcagggccctcccaacccggggactaacggcgccggtgacgacttcgccgcgcgttggtcagccatggccaccgctctcgcgctacgtagcttgtaccgagcgcgaccctcgctgcgctgtccgcccgttgagcttccctgggccccgcggcgagggcatcggctctcgccggcggatgacgagctgtatcagcggacgcgcatctctctgctgcaacgcgaggccgctcaggcaatgtacatcgacagctacaacagccgcggcttcatgataaacggaaaccgcgtgcccggcccctgcgctctgctcccgcactcggtggtgcagtggaacgtgggatcccaccaggacatcaccgaanacagcttttccctcttctggttgctgganccccgnataaanatcgtggtggtggggactggaaaccngaancgaaangctgcattcccanntgcttcaagccatgangcaacgggncatttcttttgnaaatnnaaagacacccccnaatgcctgtgccacctttnantttcttttgtnatnaagnccaataaaatgnancttcntcctttccctcnncaagaaggnaatttcnttaaattntttgggccaactttntnaataaaccccaaaaaatnaacttntnantgccttttncannntttccaangttttnanttntatnacctttgganntnttttnttaaanaaaaaaatttaaacttttnccaaaaaaaaaaaaaanggncccccnccnaaagnnnccaataaantnatttnnnaanttnatcntnttaaaaancnaaaancccnaatcntttgnttttaaancttttcccnggtttttttttnaaananctttntnaatttnaaaaaaaaaataaaaaanntn

SEQ ID NO: 816 - DNA, 1354 bp, Homo Sapiens
  misc_feature (3)..(3): n is a, c, g, or t
  misc_feature (834)..(834): n is a, c, g, or t
  misc_feature (877)..(877): n is a, c, g, or t
  misc_feature (896)..(896): n is a, c, g, or t
  misc_feature (924)..(924): n is a, c, g, or t
  misc_feature (930)..(930): n is a, c, g, or t
  misc_feature (935)..(935): n is a, c, g, or t
  misc_feature (980)..(980): n is a, c, g, or t
  misc_feature (1002)..(1002): n is a, c, g, or t
  misc_feature (1007)..(1007): n is a, c, g, or t
  misc_feature (1009)..(1009): n is a, c, g, or t
  misc_feature (1027)..(1027): n is a, c, g, or t
  misc_feature (1032)..(1032): n is a, c, g, or t
  misc_feature (1036)..(1036): n is a, c, g, or t
  misc_feature (1038)..(1038): n is a, c, g, or t
  misc_feature (1047)..(1047): n is a, c, g, or t
  misc_feature (1053)..(1053): n is a, c, g, or t
  misc_feature (1080)..(1080): n is a, c, g, or t
  misc_feature (1087)..(1087): n is a, c, g, or t
  misc_feature (1093)..(1093): n is a, c, g, or t
  misc_feature (1095)..(1096): n is a, c, g, or t
  misc_feature (1107)..(1107): n is a, c, g, or t
  misc_feature (1110)..(1110): n is a, c, g, or t
  misc_feature (1114)..(1115): n is a, c, g, or t
  misc_feature (1127)..(1127): n is a, c, g, or t
  misc_feature (1146)..(1146): n is a, c, g, or t
  misc_feature (1154)..(1154): n is a, c, g, or t
  misc_feature (1176)..(1176): n is a, c, g, or t
  misc_feature (1187)..(1188): n is a, c, g, or t
  misc_feature (1191)..(1191): n is a, c, g, or t
  misc_feature (1198)..(1199): n is a, c, g, or t
  misc_feature (1201)..(1201): n is a, c, g, or t
  misc_feature (1204)..(1205): n is a, c, g, or t
  misc_feature (1221)..(1221): n is a, c, g, or t
  misc_feature (1241)..(1241): n is a, c, g, or t
  misc_feature (1253)..(1253): n is a, c, g, or t
  misc_feature (1257)..(1257): n is a, c, g, or t
  misc_feature (1261)..(1261): n is a, c, g, or t
  misc_feature (1269)..(1269): n is a, c, g, or t
  misc_feature (1274)..(1274): n is a, c, g, or t
  misc_feature (1302)..(1302): n is a, c, g, or t
  misc_feature (1312)..(1312): n is a, c, g, or t
  misc_feature (1334)..(1334): n is a, c, g, or t
  misc_feature (1337)..(1337): n is a, c, g, or t
  misc_feature (1343)..(1343): n is a, c, g, or t
  misc_feature (1354)..(1354): n is a, c, g, or t
aanagagaaattactatgagaggatcgcatcaccatcaccatcacggatcctatttaggtgacactatagaatcgtcgacccacgcgtccgcccacgcgtccgcttttgctgtaagttcaaaagttacttctatgtctacacaaacaaaagtgatgaattcccaaatgaagatggctggagcaatgtctaccacagcaaaaacaatgcaggcagttaacaagaagatggatccacaaaagacattacaaacaatgcagaatttccagaaggaaaacatgaaaatggaaatgactgaagaaatgatcaatgatacacttgatgacatctttgacggttctgatgacgaagaagaaagccaggatattgtgaatcaagttcttgatgaaattggaattgaaatttctggaaagatggccaaagctccatcagctgctcgaagcttaccatctgcctctacttcaaaggctacaatctcagatgaagagattgaacggcaactcaaggctttaggagtagattagtcaaaagaagtcatactattttgcttacttataattatgtagtataaaccaagcacagtgcagatttcttttacaaaacacatgtattttgcaaaaaaaaaaaaaaagggcggccgctccctatagtgagtcgtattaagcttaattagctgagcttggactcctgttgatagatccagtaatgacctcagaactccatctggatttgttcagaacgctcggttgccgccgggcgttttttattggtgagaatccaagctagcttggcgagattttcaggagctaaggaagctaaaatggagaaaaaaatcnctggatataccaccgttgaatatatcccaatggcatcgtaaanaacattttgaggcatttcngtcagtttgctcaatgtacctataaccngaccgntccanctggattttacggcctttttaaagaccgtaaaaaaaaataaaccncaagtttttatcccggcctttntttcncntttcttgccccccctgangaaangccncntcccggaanttcccnatgggcaatgaaaaaacgggggacctnggggaantggganannggtttcccccnttntttnncccgtttttccntgaaccaaacctgaaaccnttttcccnccccctgggagggaaacccccnacccaattccnnccntttcccnncnatnnttccccaaaagggggngggtttcccgggaaaacccngccctatttccnaaangggntttttggnaaaantttttttccccccccccccccccggggnaatttccccntttttatttaacggggccaaantgnaaattnctccccccttn

SEQ ID NO: 817 - DNA, 1302 bp, Homo Sapiens
  misc_feature (906)..(906): n is a, c, g, or t
  misc_feature (910)..(910): n is a, c, g, or t
  misc_feature (1010)..(1010): n is a, c, g, or t
  misc_feature (1022)..(1022): n is a, c, g, or t
  misc_feature (1030)..(1030): n is a, c, g, or t
  misc_feature (1039)..(1039): n is a, c, g, or t
  misc_feature (1050)..(1050): n is a, c, g, or t
  misc_feature (1083)..(1083): n is a, c, g, or t
  misc_feature (1087)..(1087): n is a, c, g, or t
  misc_feature (1092)..(1092): n is a, c, g, or t
  misc_feature (1094)..(1094): n is a, c, g, or t
  misc_feature (1101)..(1101): n is a, c, g, or t
  misc_feature (1113)..(1114): n is a, c, g, or t
  misc_feature (1130)..(1130): n is a, c, g, or t
  misc_feature (1138)..(1138): n is a, c, g, or t
  misc_feature (1141)..(1141): n is a, c, g, or t
  misc_feature (1143)..(1143): n is a, c, g, or t
  misc_feature (1145)..(1146): n is a, c, g, or t
  misc_feature (1148)..(1148): n is a, c, g, or t
  misc_feature (1151)..(1151): n is a, c, g, or t
  misc_feature (1155)..(1155): n is a, c, g, or t
  misc_feature (1165)..(1165): n is a, c, g, or t
  misc_feature (1181)..(1181): n is a, c, g, or t
  misc_feature (1184)..(1186): n is a, c, g, or t
  misc_feature (1189)..(1189): n is a, c, g, or t
  misc_feature (1192)..(1192): n is a, c, g, or t
  misc_feature (1194)..(1194): n is a, c, g, or t
  misc_feature (1197)..(1197): n is a, c, g, or t
  misc_feature (1200)..(1200): n is a, c, g, or t
  misc_feature (1212)..(1212): n is a, c, g, or t
  misc_feature (1214)..(1214): n is a, c, g, or t
  misc_feature (1217)..(1217): n is a, c, g, or t
  misc_feature (1223)..(1223): n is a, c, g, or t
  misc_feature (1232)..(1232): n is a, c, g, or t
  misc_feature (1236)..(1236): n is a, c, g, or t
  misc_feature (1239)..(1240): n is a, c, g, or t
  misc_feature (1245)..(1245): n is a, c, g, or t
  misc_feature (1253)..(1253): n is a, c, g, or t
  misc_feature (1269)..(1269): n is a, c, g, or t
  misc_feature (1274)..(1276): n is a, c, g, or t
  misc_feature (1281)..(1281): n is a, c, g, or t
  misc_feature (1283)..(1283): n is a, c, g, or t
  misc_feature (1287)..(1287): n is a, c, g, or t
  misc_feature (1293)..(1294): n is a, c, g, or t
  misc_feature (1298)..(1298): n is a, c, g, or t
  misc_feature (1300)..(1300): n is a, c, g, or t
  misc_feature (1302)..(1302): n is a, c, g, or t
tgagaaattactatgagaggatcgcatcaccatcaccatcacggatcctatttaggtgacactatagaatcgtcgacccacgcgtccgacgccatccgctttggcaagccatgtctcctggagaacgtgggcgaggagctagacccagccctggagccagtgctgctcaagcagacgtacaagcagcagggaaacacggtgctgaagctgggggacacggtgatcccctaccatgaggacttcaggatgtacatcaccaccaagctgcccaacccacactacacgcccgagatctccaccaaactcaccctcatcaacttcaccctgtcgcccagtggcctagaggaccagctactgggccaggtagtggcagaggagcgacccgacctggaggaggccaagaaccagctgattatcagtaatgccaagatgcgccaggagctgaaggacattgaggaccagatcctgtaccggctcagctcctccgagggcaaccctgtagatgacatggaactcatcaaggtgctggaagcctccaagatgaaggctgctgagatccaggccaaagtcaggattgcagagcagacggagaaggacatcgacctgacgcgcatggagtacatacccgtggccatccgcacccagatcctcttcttctgtgtgtccgacctggccaacgtggaccccatgtaccagtactcccttgagtggtttctcaacatcttcctctcgggcatcgccaactcagagagagcagacaacctgaagaagcgcatctccaacatcaaccgctacctgacctacagcctctacagcaacgtctgccgcagcctctttgaaaagcacaagctgatgtttgccttcctgctgtgtgttcgcatcatgatgaacgagggcaaaatcaanccanagtgagtggcgatacctcctgtctgggggctccatctcgatcatgactgaaaatccggcaccggactggctgtcaaaccgggcttggcgagacatcctancactctcgaacntgccaacnttttcctcnttttttccganttcgtgaagcacctctcaaaattccgggtcatnttcnaagcntngaccccncgggagcctttnnctgggatttgggaccntacttaancantncnnanctnctantcctccctgnctgggggggaaaggtnccnnnccntgngnganttntggccccactgngnccntttttnaacccaaanccantgnnggggntttaaaanccattccccccccttnttttnnnttccngnaaanttttgnnactnantn

SEQ ID NO: 818 - DNA, 1420 bp, Homo Sapiens
  misc_feature (883)..(883): n is a, c, g, or t
  misc_feature (908)..(908): n is a, c, g, or t
  misc_feature (957)..(957): n is a, c, g, or t
  misc_feature (965)..(965): n is a, c, g, or t
  misc_feature (980)..(980): n is a, c, g, or t
  misc_feature (993)..(993): n is a, c, g, or t
  misc_feature (1002)..(1002): n is a, c, g, or t
  misc_feature (1010)..(1010): n is a, c, g, or t
  misc_feature (1023)..(1023): n is a, c, g, or t
  misc_feature (1041)..(1041): n is a, c, g, or t
  misc_feature (1045)..(1045): n is a, c, g, or t
  misc_feature (1048)..(1048): n is a, c, g, or t
  misc_feature (1064)..(1064): n is a, c, g, or t
  misc_feature (1078)..(1078): n is a, c, g, or t
  misc_feature (1088)..(1088): n is a, c, g, or t
  misc_feature (1093)..(1093): n is a, c, g, or t
  misc_feature (1098)..(1098): n is a, c, g, or t
  misc_feature (1111)..(1111): n is a, c, g, or t
  misc_feature (1117)..(1117): n is a, c, g, or t
  misc_feature (1119)..(1119): n is a, c, g, or t
  misc_feature (1143)..(1143): n is a, c, g, or t
  misc_feature (1148)..(1148): n is a, c, g, or t
  misc_feature (1150)..(1151): n is a, c, g, or t
  misc_feature (1153)..(1153): n is a, c, g, or t
  misc_feature (1159)..(1159): n is a, c, g, or t
  misc_feature (1166)..(1168): n is a, c, g, or t
  misc_feature (1171)..(1171): n is a, c, g, or t
  misc_feature (1173)..(1174): n is a, c, g, or t
  misc_feature (1176)..(1176): n is a, c, g, or t
  misc_feature (1179)..(1179): n is a, c, g, or t
  misc_feature (1181)..(1181): n is a, c, g, or t
  misc_feature (1188)..(1188): n is a, c, g, or t
  misc_feature (1193)..(1193): n is a, c, g, or t
  misc_feature (1196)..(1198): n is a, c, g, or t
  misc_feature (1215)..(1215): n is a, c, g, or t
  misc_feature (1218)..(1218): n is a, c, g, or t
  misc_feature (1233)..(1234): n is a, c, g, or t
  misc_feature (1239)..(1239): n is a, c, g, or t
  misc_feature (1245)..(1245): n is a, c, g, or t
  misc_feature (1249)..(1250): n is a, c, g, or t
  misc_feature (1254)..(1255): n is a, c, g, or t
  misc_feature (1257)..(1257): n is a, c, g, or t
  misc_feature (1267)..(1267): n is a, c, g, or t
  misc_feature (1270)..(1270): n is a, c, g, or t
  misc_feature (1278)..(1278): n is a, c, g, or t
  misc_feature (1284)..(1284): n is a, c, g, or t
  misc_feature (1296)..(1296): n is a, c, g, or t
  misc_feature (1298)..(1298): n is a, c, g, or t
  misc_feature (1307)..(1307): n is a, c, g, or t
  misc_feature (1312)..(1312): n is a, c, g, or t
  misc_feature (1315)..(1315): n is a, c, g, or t
  misc_feature (1318)..(1318): n is a, c, g, or t
  misc_feature (1321)..(1321): n is a, c, g, or t
  misc_feature (1323)..(1323): n is a, c, g, or t
  misc_feature (1332)..(1332): n is a, c, g, or t
  misc_feature (1338)..(1338): n is a, c, g, or t
  misc_feature (1343)..(1343): n is a, c, g, or t
  misc_feature (1347)..(1347): n is a, c, g, or t
  misc_feature (1352)..(1352): n is a, c, g, or t
  misc_feature (1354)..(1356): n is a, c, g, or t
  misc_feature (1362)..(1363): n is a, c, g, or t
  misc_feature (1367)..(1367): n is a, c, g, or t
  misc_feature (1374)..(1374): n is a, c, g, or t
  misc_feature (1376)..(1376): n is a, c, g, or t
  misc_feature (1380)..(1380): n is a, c, g, or t
  misc_feature (1384)..(1384): n is a, c, g, or t
  misc_feature (1389)..(1390): n is a, c, g, or t
  misc_feature (1393)..(1393): n is a, c, g, or t
  misc_feature (1396)..(1396): n is a, c, g, or t
  misc_feature (1398)..(1398): n is a, c, g, or t
  misc_feature (1400)..(1400): n is a, c, g, or t
  misc_feature (1405)..(1406): n is a, c, g, or t
  misc_feature (1414)..(1414): n is a, c, g, or t
  misc_feature (1416)..(1416): n is a, c, g, or t
  misc_feature (1419)..(1419): n is a, c, g, or t
gagagattactatgagaggatcgcatcaccatcaccatcacggatcctatttaggtgacactatagaatcgtcgacccacgcgtccgatgagatttcctttttatcccacccccccacaccccaaacagacattgctggagggcagactggaggaaggggaaggcatgcaggtaaattactgccttgtcagcctctgaccctcatctctcagaattgttggctgagaattaacccaaggaccacaccagtgcctgatttctacttagggagagaggattggaaacgatccctaagaaactgactgagggtgagaatggccaggaggtgtgtgtccaaataaccaggagggggcacagaagatgatggcaaggcagactgggcagtgttttgtagacacagaacaaagaatcagaatttgaaaaaagaagaaaaacaaatcttcgcagctgcaactttaaagtatcacctttatagatggcagggatttccattatgcaaatggaatctaagatttcaatgtgaaatcttagaatgcagttttaccacttgcagtcttgtatttgtggtggccatgtggtgagggcggtgatgctgagctttctgcccaggaggaatgagctttcaagctctcagcagggtgtcaggcttggggatttgagcatccactgctcaaagtccaggctattctccagtcctcacggcagccactaagcccaggagccagacctggcccagggacacatctcctgagggatcccagaaagaacccagtctttcctttcccttggggtccttgttagaatgaaaacctctctatttaaggcacatcattcccagctaggtttatacacttgtctatattttactggaggaaagggaatnaaaaaagaactctgcagttcaaggnccctttcatttaaccttccaaaaacagccaactcattttaagactcatngctgaggngatagaaaaaacctnatcctctccaccnttacattcncaaaaccntccttgggtactngactgccctaaacggggngacnctnaggttccttacgaagnggaaaatcaaatgngggaaggccnggcgngggcnatggtgggttctnaccccncnggaagcccaaggcaaggactaggngaccncnngnccccanaaaaggnnnttntnngnggngnaaacccnagggngannntttgggaccccccgccnccnggaggaactaacccnngggtngggggncccnncccnngnttccccaccnaancccttttnaacccnggtttgaacccnanccccttccnaaaanttncanccntntggaaaacngaaccnccccngggnaattncnnnggaaannaaantttcccntnttcncccnggggnnccnggngngngtttnnaaaaaaanangcng

SEQ ID NO: 819 - DNA, 1358 bp, Homo Sapiens
  misc_feature (791)..(791): n is a, c, g, or t
  misc_feature (799)..(799): n is a, c, g, or t
  misc_feature (895)..(895): n is a, c, g, or t
  misc_feature (933)..(933): n is a, c, g, or t
  misc_feature (941)..(941): n is a, c, g, or t
  misc_feature (951)..(951): n is a, c, g, or t
  misc_feature (989)..(989): n is a, c, g, or t
  misc_feature (993)..(993): n is a, c, g, or t
  misc_feature (1017)..(1017): n is a, c, g, or t
  misc_feature (1027)..(1027): n is a, c, g, or t
  misc_feature (1029)..(1029): n is a, c, g, or t
  misc_feature (1042)..(1042): n is a, c, g, or t
  misc_feature (1046)..(1046): n is a, c, g, or t
  misc_feature (1050)..(1050): n is a, c, g, or t
  misc_feature (1055)..(1055): n is a, c, g, or t
  misc_feature (1062)..(1062): n is a, c, g, or t
  misc_feature (1068)..(1068): n is a, c, g, or t
  misc_feature (1070)..(1070): n is a, c, g, or t
  misc_feature (1077)..(1077): n is a, c, g, or t
  misc_feature (1083)..(1083): n is a, c, g, or t
  misc_feature (1098)..(1098): n is a, c, g, or t
  misc_feature (1100)..(1100): n is a, c, g, or t
  misc_feature (1105)..(1105): n is a, c, g, or t
  misc_feature (1130)..(1131): n is a, c, g, or t
  misc_feature (1133)..(1133): n is a, c, g, or t
  misc_feature (1153)..(1153): n is a, c, g, or t
  misc_feature (1166)..(1166): n is a, c, g, or t
  misc_feature (1188)..(1188): n is a, c, g, or t
  misc_feature (1192)..(1192): n is a, c, g, or t
  misc_feature (1195)..(1195): n is a, c, g, or t
  misc_feature (1197)..(1197): n is a, c, g, or t
  misc_feature (1206)..(1206): n is a, c, g, or t
  misc_feature (1208)..(1208): n is a, c, g, or t
  misc_feature (1217)..(1217): n is a, c, g, or t
  misc_feature (1221)..(1221): n is a, c, g, or t
  misc_feature (1230)..(1230): n is a, c, g, or t
  misc_feature (1233)..(1233): n is a, c, g, or t
  misc_feature (1239)..(1239): n is a, c, g, or t
  misc_feature (1249)..(1249): n is a, c, g, or t
  misc_feature (1251)..(1251): n is a, c, g, or t
  misc_feature (1254)..(1254): n is a, c, g, or t
  misc_feature (1260)..(1260): n is a, c, g, or t
  misc_feature (1267)..(1267): n is a, c, g, or t
  misc_feature (1269)..(1270): n is a, c, g, or t
  misc_feature (1275)..(1276): n is a, c, g, or t
  misc_feature (1283)..(1284): n is a, c, g, or t
  misc_feature (1290)..(1290): n is a, c, g, or t
  misc_feature (1294)..(1294): n is a, c, g, or t
  misc_feature (1296)..(1296): n is a, c, g, or t
  misc_feature (1299)..(1299): n is a, c, g, or t
  misc_feature (1301)..(1301): n is a, c, g, or t
  misc_feature (1308)..(1308): n is a, c, g, or t
  misc_feature (1310)..(1311): n is a, c, g, or t
  misc_feature (1315)..(1316): n is a, c, g, or t
  misc_feature (1318)..(1318): n is a, c, g, or t
  misc_feature (1321)..(1322): n is a, c, g, or t
  misc_feature (1327)..(1328): n is a, c, g, or t
  misc_feature (1335)..(1335): n is a, c, g, or t
  misc_feature (1347)..(1347): n is a, c, g, or t
  misc_feature (1352)..(1352): n is a, c, g, or t
aatagagaaattactatgagaggatcgcatcaccatcaccatcacggatcctatttaggtgacactatagaatcgtcgacccacgcgtccggaggagacatggcggcggcgccggtagcggctgggtctggagccggccgagggagacggtcggcagccacagtggcggcttggggcggatggggcggccggccgcggcctggtaacattctgctgcagctgcggcagggccagctgaccggccggggcctggtccgggcggtgcagttcactgagacttttttgacggagagggacaaacaatccaagtggagtggaattcctcagctgctcctcaagctgcacaccaccagccacctccacagtgactttgttgagtgtcaaaacatcctcaaggaaatttctcctcttctctccatggaggctatggcatttgttactgaagagaggaaacttacccaagaaaccacttatccaaatacttacatttttgacttgtttggaggtgttgatcttcttgtagaaattcttatgaggcctacgatctctatccggggacagaaactgaaaataagtgatgaaatgtccaaggactgcttgagtatcctgtataatacctgtgtctgtacagagggagttacaaagcgtttggcagaaaagaatgactttgtgatcttcctgtttacattgatgacaagtaagaagacattcttacaaacagcaaccctcattgaagatattttgggtgttaaaaaggaaatgatccgactagatgaagtccccaatctganttccttantatccaatttcgatcagcagcagctcgctaatttctgccggaattctggctgtcaccatttcaaagatggatacagggaatgatgacaagcacacncttcttgccaaaaatgctcaacaaaaaaaaaacttgantttggggnccttctgcanctgaaatcaatcaagcggcccttctcaacattcctggntttnttgaacggcttttgcaaactggcnaactccaaangngttcaaaatcaangggnaaancccantttcttncaggantngaaaaangggaancatgggctaaaaaangnctttnggtgctaaaatgcccttgatccaanngnccaatgaggaatccaaaacnaatcaagggcttnttaaaaaaaaaggcctgccccnaaanttnanccaaaaacnanttgcccccntcangaaaaaatnccngaaatntttaaaaacngnaangtcctnttccccncnngccgnnaaggggnncccccnaaancnttncnaaaaaantnnaaanncnccnnacccnnaaaaaanttttttaaaaanatttngaaaaa

SEQ ID NO: 820 - DNA, 1200 bp, Homo Sapiens
  misc_feature (16)..(16): n is a, c, g, or t
  misc_feature (90)..(90): n is a, c, g, or t
  misc_feature (867)..(867): n is a, c, g, or t
  misc_feature (905)..(905): n is a, c, g, or t
  misc_feature (920)..(920): n is a, c, g, or t
  misc_feature (955)..(955): n is a, c, g, or t
  misc_feature (960)..(960): n is a, c, g, or t
  misc_feature (973)..(973): n is a, c, g, or t
  misc_feature (977)..(1019): n is a, c, g, or t
  misc_feature (1034)..(1034): n is a, c, g, or t
  misc_feature (1048)..(1048): n is a, c, g, or t
  misc_feature (1050)..(1050): n is a, c, g, or t
  misc_feature (1085)..(1085): n is a, c, g, or t
  misc_feature (1092)..(1093): n is a, c, g, or t
  misc_feature (1099)..(1099): n is a, c, g, or t
  misc_feature (1112)..(1112): n is a, c, g, or t
  misc_feature (1116)..(1116): n is a, c, g, or t
  misc_feature (1122)..(1122): n is a, c, g, or t
  misc_feature (1127)..(1127): n is a, c, g, or t
  misc_feature (1138)..(1138): n is a, c, g, or t
  misc_feature (1141)..(1141): n is a, c, g, or t
  misc_feature (1144)..(1144): n is a, c, g, or t
  misc_feature (1147)..(1148): n is a, c, g, or t
  misc_feature (1150)..(1150): n is a, c, g, or t
  misc_feature (1155)..(1155): n is a, c, g, or t
  misc_feature (1159)..(1159): n is a, c, g, or t
  misc_feature (1162)..(1162): n is a, c, g, or t
  misc_feature (1165)..(1165): n is a, c, g, or t
  misc_feature (1168)..(1168): n is a, c, g, or t
  misc_feature (1174)..(1174): n is a, c, g, or t
  misc_feature (1177)..(1177): n is a, c, g, or t
  misc_feature (1196)..(1196): n is a, c, g, or t
tttgaggaaaattacntatgagaggatgcatcaccatcaccatcacggatcctattttaggtgacactatagaatcgtcgacccacgcgntccgcccacgcgtccgccgaccccggccccacgggcggacactcggccgggcagccgcgggccgagcgcagccgcctccgccaccgatgcgcctggtggccagactccaagtgggaccggcggacacgcagcctcgcgtgtcaggggaagctgatggagaatcgagctctggatccagggactcgggactcctatggtgccaccagccacctccccaacaagggggccctggcgaaggtcaagaacaacttcaaagacttgatgtccaaactgacggagggccagtatgtgctgtgccggtggacagatggcctgtactacctcgggaagatcaagagggtcagcagctctaagcaaagctgcctcgtgactttcgaagataattccaaatactgggtcctatggaaggacatacagcatgccggtgttccaggagaggagcccaagtgcaacatctgcctagggaagacatcagggccgctgaatgagatcctcatctgcgggaagtgtggcctgggttaccaccagcagtgccacatccccatagcgggcagtgctgaccagcccctgctcacaccttggttctgccgacgctgtatcttcgcactggctgtgcgggtgagccttccatcctccccagtccctgcctctcctgcctcctccagtggggcagaccagagactcccatcacagagcctgagctccaagcagaagggccacacctgggctttggagacagatagcgcctctgccactgtccttggccaggatttgtanactccctgagcctcagtttcctcaactgtaaagtgganatgggtttggtgtcnggaataacggaccaataaatgatgctttactattnaaaanaaatcctgtaaanaaannnnnnnnnnnnnnnnnnnnnnnnnnnnnnnnnnnnnnnnnnnaaaaaaaggggggcnctccctaaaggagncnataacttattactaactggatctgttaaaatccanaagactnnaactcnttgatttttaaancttngttgcnccggntttttttgggnaanccnctnntngggantttnggnctngancttaanggnaaaaatcttggtaaccccnttaa

SEQ ID NO: 821 - DNA, 1200 bp, Homo Sapiens
  misc_feature (785)..(785): n is a, c, g, or t
  misc_feature (871)..(871): n is a, c, g, or t
  misc_feature (910)..(910): n is a, c, g, or t
  misc_feature (914)..(914): n is a, c, g, or t
  misc_feature (920)..(920): n is a, c, g, or t
  misc_feature (927)..(927): n is a, c, g, or t
  misc_feature (949)..(949): n is a, c, g, or t
  misc_feature (958)..(958): n is a, c, g, or t
  misc_feature (962)..(962): n is a, c, g, or t
  misc_feature (965)..(965): n is a, c, g, or t
  misc_feature (974)..(974): n is a, c, g, or t
  misc_feature (979)..(979): n is a, c, g, or t
  misc_feature (1004)..(1004): n is a, c, g, or t
  misc_feature (1032)..(1032): n is a, c, g, or t
  misc_feature (1043)..(1043): n is a, c, g, or t
  misc_feature (1050)..(1050): n is a, c, g, or t
  misc_feature (1056)..(1056): n is a, c, g, or t
  misc_feature (1058)..(1058): n is a, c, g, or t
  misc_feature (1061)..(1061): n is a, c, g, or t
  misc_feature (1078)..(1078): n is a, c, g, or t
  misc_feature (1085)..(1085): n is a, c, g, or t
  misc_feature (1087)..(1087): n is a, c, g, or t
  misc_feature (1090)..(1090): n is a, c, g, or t
  misc_feature (1099)..(1099): n is a, c, g, or t
  misc_feature (1101)..(1102): n is a, c, g, or t
  misc_feature (1105)..(1106): n is a, c, g, or t
  misc_feature (1115)..(1115): n is a, c, g, or t
  misc_feature (1117)..(1118): n is a, c, g, or t
  misc_feature (1127)..(1127): n is a, c, g, or t
  misc_feature (1142)..(1142): n is a, c, g, or t
  misc_feature (1146)..(1146): n is a, c, g, or t
  misc_feature (1152)..(1153): n is a, c, g, or t
  misc_feature (1155)..(1156): n is a, c, g, or t
  misc_feature (1164)..(1164): n is a, c, g, or t
  misc_feature (1170)..(1173): n is a, c, g, or t
  misc_feature (1178)..(1178): n is a, c, g, or t
  misc_feature (1183)..(1185): n is a, c, g, or t
  misc_feature (1188)..(1188): n is a, c, g, or t
  misc_feature (1191)..(1191): n is a, c, g, or t
  misc_feature (1193)..(1193): n is a, c, g, or t
  misc_feature (1196)..(1197): n is a, c, g, or t
taaaagagaaattactatgagaggatcgcatcaccatcaccatcacggatcctatttaggtgacactatagaatcgtcgacccacgcgtccgctgagaatggtttgatccccaaggattaccgatctctgaaaacacagtatctgcagagctatggccctgagcacctgctaaccttctccaatctgcgaagagctgggctcctaacggagcaggcccccggggacaccctcacagccgtggagagtaaagtgagcaagctggtgaccgacaaggctgcaggaaagattactgatgccttcagttctctggccaagaggagcaattttcgtgccatcagcaaaaagctgaatttgatcccacgtgtggacggcgagtatgatctgaaagtgccccgagacatggcttacgtcttcggtggtgcttatgtgcccctgagctgccgaatcattgagcaggtgctagagcggcgaagctggcagggccttgatgaggtggtacggctgctcaactgcagtgactttgcattcacagggctgaatctggtctgatcctcacagatatgactaaggaagacaaggcttccagtgagtccctgcgcctcatcttggtggtgttcttgggtggttgtacattctctgagatctcagccctccggttcctgggcagagagaaaggtaagagagagcagaaaggtgagaattggcctgcattgtatctgggtaacaaagtgtcagctgggcacggtggttcatacctgtaatctcagcactttgggaggcggangcgggcagatcacctgaggtcaggagttagagcctagcctgaccaacatggtgaaaccccatctctacgaaaaatacaaaaattanccaggcatggtggccggtgcctgtaatgctaactactcnggangctgangcagganaattgcttgaacccggaagtgnaggttgcantganctnaaatgcccnttgcnctccacctgggcaaaaataacaaanctcctctcagaaaaaaaaaaaaaccccnaagtgtctgcnaggaaantttttncnggnctcaaaaaaaacttgcnaaacctnantcnggctgcccnannggnncccattttncnntctaaaaancagggggcccaaaanaggncccccnncnntctaaaanggggcnnnntcccnggggnnnggnaangnaannctt

SEQ ID NO: 822 - DNA, 1380 bp, Homo Sapiens
  misc_feature (862)..(862): n is a, c, g, or t
  misc_feature (916)..(916): n is a, c, g, or t
  misc_feature (921)..(921): n is a, c, g, or t
  misc_feature (962)..(962): n is a, c, g, or t
  misc_feature (989)..(989): n is a, c, g, or t
  misc_feature (1003)..(1003): n is a, c, g, or t
  misc_feature (1023)..(1023): n is a, c, g, or t
  misc_feature (1026)..(1026): n is a, c, g, or t
  misc_feature (1047)..(1047): n is a, c, g, or t
  misc_feature (1057)..(1057): n is a, c, g, or t
  misc_feature (1063)..(1063): n is a, c, g, or t
  misc_feature (1066)..(1066): n is a, c, g, or t
  misc_feature (1070)..(1070): n is a, c, g, or t
  misc_feature (1079)..(1079): n is a, c, g, or t
  misc_feature (1090)..(1090): n is a, c, g, or t
  misc_feature (1112)..(1112): n is a, c, g, or t
  misc_feature (1115)..(1115): n is a, c, g, or t
  misc_feature (1137)..(1138): n is a, c, g, or t
  misc_feature (1140)..(1141): n is a, c, g, or t
  misc_feature (1143)..(1145): n is a, c, g, or t
  misc_feature (1148)..(1149): n is a, c, g, or t
  misc_feature (1159)..(1159): n is a, c, g, or t
  misc_feature (1162)..(1163): n is a, c, g, or t
  misc_feature (1165)..(1165): n is a, c, g, or t
  misc_feature (1167)..(1167): n is a, c, g, or t
  misc_feature (1175)..(1175): n is a, c, g, or t
  misc_feature (1191)..(1192): n is a, c, g, or t
  misc_feature (1213)..(1213): n is a, c, g, or t
  misc_feature (1240)..(1240): n is a, c, g, or t
  misc_feature (1247)..(1247): n is a, c, g, or t
  misc_feature (1250)..(1250): n is a, c, g, or t
  misc_feature (1252)..(1252): n is a, c, g, or t
  misc_feature (1260)..(1260): n is a, c, g, or t
  misc_feature (1264)..(1266): n is a, c, g, or t
  misc_feature (1269)..(1270): n is a, c, g, or t
  misc_feature (1276)..(1276): n is a, c, g, or t
  misc_feature (1280)..(1282): n is a, c, g, or t
  misc_feature (1284)..(1284): n is a, c, g, or t
  misc_feature (1296)..(1296): n is a, c, g, or t
  misc_feature (1305)..(1305): n is a, c, g, or t
  misc_feature (1322)..(1322): n is a, c, g, or t
  misc_feature (1324)..(1325): n is a, c, g, or t
  misc_feature (1333)..(1333): n is a, c, g, or t
  misc_feature (1336)..(1337): n is a, c, g, or t
  misc_feature (1341)..(1341): n is a, c, g, or t
  misc_feature (1343)..(1343): n is a, c, g, or t
  misc_feature (1352)..(1352): n is a, c, g, or t
  misc_feature (1356)..(1356): n is a, c, g, or t
  misc_feature (1363)..(1365): n is a, c, g, or t
  misc_feature (1373)..(1374): n is a, c, g, or t
tagagaaaattactatgagaggatcgcatcaccatcaccatcacggatcctatttaggtgacactatagaatcgtcgacctgcaagatctgcggccgctccctatagtgagtcgtattaagcttaattagctgagcttggactcctgttgatagatccagtaatgacctcagaactccatctggatttgttcagaacgctcggttgccgccgggcgttttttattggtgagaatccaagctagcttggcgagattttcaggagctaaggaagctaaaatggagaaaaaaatcactggatataccaccgttgatatatcccaatggcatcgtaaagaacattttgaggcatttcagtcagttgctcaatgtacctataaccagaccgttcagctggatattacggcctttttaaagaccgtaaagaaaaataagcacaagttttatccggcctttattcacattcttgcccgcctgatgaatgctcatccggaatttcgtatggcaatgaaagacggtgagctggtgatatgggatagtgttcacccttgttacaccgttttccatgagcaaactgaaacgttttcatcgctctggagtgaataccacgacgatttccggcagtttctacacatatattcgcaagatgtggcgtgttacggtgaaaacctggcctatttccctaaagggtttattgagaatatgtttttcgtctcagccaatccctgggtgagtttcaccagttttgatttaaacgtggccaatatggacaacttcttcgcccccgttttcaccatggggcaaatattatacgcaaggcgacaaggtgctgatgccgctggcgattcaggttcatcatgccgntttgtgatggcttccatgtcggcagaatgcttaatgaattacaacagtactgcnatgantggcagggcggggcgtaaatttttttaaggcagttattggngcccttaacgcctgggggaatgactcnctaccttgaggcancaaaaaaacgaaaggctcantcnaaaaacgggcccttcgtttanccggtggttngccggngancccncccctgaanagaaaaacccncccccctaaagctgcccccccncgnttcggggaaaacggggaaaacnncnnannngcnnctccggaaanggnncnancttttctntaacggagcccgggannaaaaaaccccccgggcccccnccggggttggggggtcgggcccccctnacccccnccntncaaaaggnaggnnnggnnttaatngggnnncnaaaaattttttnagggccctnggggggaaaccccaaancnnggaaaaanccnngggncnccccccccnaaancccccgnnngggggggnnaaatcc

SEQ ID NO: 823 - DNA, 1317 bp, Homo Sapiens
  misc_feature (913)..(913): n is a, c, g, or t
  misc_feature (924)..(924): n is a, c, g, or t
  misc_feature (974)..(974): n is a, c, g, or t
  misc_feature (977)..(977): n is a, c, g, or t
  misc_feature (982)..(982): n is a, c, g, or t
  misc_feature (987)..(987): n is a, c, g, or t
  misc_feature (997)..(997): n is a, c, g, or t
  misc_feature (1009)..(1009): n is a, c, g, or t
  misc_feature (1020)..(1020): n is a, c, g, or t
  misc_feature (1029)..(1029): n is a, c, g, or t
  misc_feature (1031)..(1031): n is a, c, g, or t
  misc_feature (1046)..(1046): n is a, c, g, or t
  misc_feature (1052)..(1052): n is a, c, g, or t
  misc_feature (1087)..(1087): n is a, c, g, or t
  misc_feature (1094)..(1094): n is a, c, g, or t
  misc_feature (1099)..(1099): n is a, c, g, or t
  misc_feature (1101)..(1101): n is a, c, g, or t
  misc_feature (1109)..(1109): n is a, c, g, or t
  misc_feature (1118)..(1118): n is a, c, g, or t
  misc_feature (1137)..(1137): n is a, c, g, or t
  misc_feature (1142)..(1142): n is a, c, g, or t
  misc_feature (1155)..(1156): n is a, c, g, or t
  misc_feature (1166)..(1166): n is a, c, g, or t
  misc_feature (1168)..(1168): n is a, c, g, or t
  misc_feature (1172)..(1172): n is a, c, g, or t
  misc_feature (1196)..(1198): n is a, c, g, or t
  misc_feature (1202)..(1202): n is a, c, g, or t
  misc_feature (1205)..(1205): n is a, c, g, or t
  misc_feature (1213)..(1213): n is a, c, g, or t
  misc_feature (1226)..(1226): n is a, c, g, or t
  misc_feature (1231)..(1232): n is a, c, g, or t
  misc_feature (1236)..(1236): n is a, c, g, or t
  misc_feature (1242)..(1242): n is a, c, g, or t
  misc_feature (1253)..(1254): n is a, c, g, or t
  misc_feature (1269)..(1269): n is a, c, g, or t
  misc_feature (1281)..(1281): n is a, c, g, or t
  misc_feature (1283)..(1283): n is a, c, g, or t
  misc_feature (1307)..(1307): n is a, c, g, or t
  misc_feature (1312)..(1312): n is a, c, g, or t
gattagagaaattactatgagaggatcgcatcaccatcaccatcacggatcctatttaggtgacactatagaatcgtcgacccacgcgtccggacaaacctgccaacgtccagccttattacctctatggatccaagcctctcaacattgcctacagccacatctacagctcctacaggaatttcgtggggccacctcatttcaagactatctgcagactcctgggttatcagggcatcgctgtggtcatggaggaactgctaaagattgtgaagagcttgctccaaggaaccattctccagtatgtgaaaacactgatagaggtgatgcccaagatatgccgcttgccccgacatgagtatggctccccagggatcctggagttcttccaccaccagctgaaggacatcattgagtacgcagagctcaaaacagacgtgttccagagcctgagggaagtgggcaatgccatcctcttctgcctcctcatagagcaagctctgtctcaggaggaggtctgcgatttgctccatgccgcacccttccaaaacatcttgcctagagtctacatcaaagagggggagcgcctggaggtccggatgaaacgtctggaagccaagtatgccccgctccacctggtccctctgatcgagcggctggggacccctcagcaaatcgccattgctcgcgagggtgacctcctgaccaaggagcggctgtgctgtggcctgtccatgttcgaggtcatcctgacccgcattcggagctacctgcaggaccccatctggcgggggcccaccgcccaccaatggcgtcatgcacgtcgatgagtgtgtggagttccaccggctgtggagcgccatgcagttcgtgtactgcatccctggggggaaccaacgagttcacagctgancagtggtttcngcgatggcttgaactgggctggttgctccatcattgtcctgctgggccancancgtcnctttnaactgtttcnacttctgttacncctgctaaaantgcaaaagncnggacgggaaaggatnaaatcnttaaaaatgtgcccctgaaaaaaaagggcccaacnggaatcnggaantnttcaaatnttgaacaanggaggtttttgcccttccngaaanaaaaaaattgaannccgggaaaananaaanttccccgggggaaacaggggggcnnntttnaancccccatnccaaattcttggnccccnntttntaaaanaaaaaatcttnnaaaccttttttgggngaaaaaaaaaancnggaaaaaaaaaccccccccccccnccaanaatcc

SEQ ID NO: 824 - DNA, 1384 bp, Homo Sapiens
  misc_feature (2)..(2): n is a, c, g, or t
  misc_feature (834)..(834): n is a, c, g, or t
  misc_feature (836)..(837): n is a, c, g, or t
  misc_feature (839)..(839): n is a, c, g, or t
  misc_feature (841)..(864): n is a, c, g, or t
  misc_feature (933)..(933): n is a, c, g, or t
  misc_feature (938)..(938): n is a, c, g, or t
  misc_feature (958)..(958): n is a, c, g, or t
  misc_feature (968)..(968): n is a, c, g, or t
  misc_feature (975)..(975): n is a, c, g, or t
  misc_feature (977)..(977): n is a, c, g, or t
  misc_feature (988)..(988): n is a, c, g, or t
  misc_feature (993)..(993): n is a, c, g, or t
  misc_feature (1002)..(1002): n is a, c, g, or t
  misc_feature (1018)..(1018): n is a, c, g, or t
  misc_feature (1031)..(1031): n is a, c, g, or t
  misc_feature (1038)..(1038): n is a, c, g, or t
  misc_feature (1044)..(1044): n is a, c, g, or t
  misc_feature (1049)..(1049): n is a, c, g, or t
  misc_feature (1077)..(1077): n is a, c, g, or t
  misc_feature (1085)..(1085): n is a, c, g, or t
  misc_feature (1091)..(1091): n is a, c, g, or t
  misc_feature (1094)..(1094): n is a, c, g, or t
  misc_feature (1103)..(1103): n is a, c, g, or t
  misc_feature (1109)..(1109): n is a, c, g, or t
  misc_feature (1114)..(1114): n is a, c, g, or t
  misc_feature (1117)..(1117): n is a, c, g, or t
  misc_feature (1121)..(1121): n is a, c, g, or t
  misc_feature (1123)..(1127): n is a, c, g, or t
  misc_feature (1129)..(1129): n is a, c, g, or t
  misc_feature (1136)..(1136): n is a, c, g, or t
  misc_feature (1145)..(1145): n is a, c, g, or t
  misc_feature (1149)..(1149): n is a, c, g, or t
  misc_feature (1161)..(1161): n is a, c, g, or t
  misc_feature (1164)..(1164): n is a, c, g, or t
  misc_feature (1172)..(1172): n is a, c, g, or t
  misc_feature (1175)..(1176): n is a, c, g, or t
  misc_feature (1184)..(1184): n is a, c, g, or t
  misc_feature (1186)..(1186): n is a, c, g, or t
  misc_feature (1188)..(1188): n is a, c, g, or t
  misc_feature (1197)..(1197): n is a, c, g, or t
  misc_feature (1207)..(1207): n is a, c, g, or t
  misc_feature (1211)..(1211): n is a, c, g, or t
  misc_feature (1214)..(1214): n is a, c, g, or t
  misc_feature (1224)..(1224): n is a, c, g, or t
  misc_feature (1226)..(1226): n is a, c, g, or t
  misc_feature (1233)..(1233): n is a, c, g, or t
  misc_feature (1237)..(1238): n is a, c, g, or t
  misc_feature (1242)..(1244): n is a, c, g, or t
  misc_feature (1251)..(1251): n is a, c, g, or t
  misc_feature (1276)..(1276): n is a, c, g, or t
  misc_feature (1284)..(1284): n is a, c, g, or t
  misc_feature (1299)..(1299): n is a, c, g, or t
  misc_feature (1314)..(1314): n is a, c, g, or t
  misc_feature (1317)..(1318): n is a, c, g, or t
  misc_feature (1322)..(1323): n is a, c, g, or t
  misc_feature (1327)..(1328): n is a, c, g, or t
  misc_feature (1330)..(1330): n is a, c, g, or t
  misc_feature (1378)..(1378): n is a, c, g, or t
  misc_feature (1380)..(1381): n is a, c, g, or t
antagagaaattactatgagaggatcgcatcaccatcaccatcacggatcctatttaggtgacactatagaatcgtcgacccacgcgtccgccgctgccctgagctcggcgggctggcattcggcccggggaaaagcggagcaggtctgcgaggctaagtgtctccgcggcgcacctcgcggcgagaatccggaggagaaggagactgcaaggataggcccagaaaaacaaccagaaaaaaaaaatctcatcatggcaaatattcaccaggaaaacgaagagatggagcagcctatgcagaatggagaggaagaccgccctttgggaggaggtgaaggccaccagcctgcaggaaatcgacggggacaggctcgccgacttgcccctaattttcgatgggccatacccaataggcagatcaatgatgggatgggtggagatggagatgatatggaaatattcatggaggagatgagagaaatcagaagaaaacttagggagctgcagttgaggaattgtctgcgtatccttatgggggagctctctaatcaccatgaccatcatgatgaattttgccttatgccttgactcctgccatttatcatgagattaatactgtgattcccgctgttttctttttccttgcattttcctaatatgcctttactgatccgtttgctgtgaaccctatgttatttccatgtgtcaagtgggtcttgtgttgccagcttctatttgaagattgcctttgcactcagtgtaagtttctgtcagcagtagtttcacccatttgcatggaaaaatttaaagctaataaagcaatttaaaaagccnannanannnnnnnnnnnnnnnnnnnnnnnnaaagggcggccgctccctatagtgagtcgtattaagcttaattagctgaacttggactcctgttgatanatccngtaatgacctccaaactccntctggatttnttcaaancnctcggttgccnccggncgttttttnttggtgaaaatccaanctagcttggcganattttcnggactnaggancttaaatggaaaaaaaatccctggaaancccccgtngatttnccnatggcctcnaaaaanatttnggncttncnnnnntngccatgncctttaccnaacnttccctggattncgnctttttanacnnaaaaaaanancnaatttttcngcctttttcncttnttncccccgaaangnccccccnattnnttgnnntaaaacnggacgggataggaagttcccttttnccctttcngaaaaaaaattttcnttgggaaacccaatncgnnttcnntttnnangggggggggaaccccttccaggttttatttttccccccgggttttttntnnaaa

SEQ ID NO: 825 - DNA, 1200 bp, Homo Sapiens
  misc_feature (4)..(4): n is a, c, g, or t
  misc_feature (7)..(7): n is a, c, g, or t
  misc_feature (9)..(9): n is a, c, g, or t
  misc_feature (25)..(25): n is a, c, g, or t
  misc_feature (31)..(31): n is a, c, g, or t
  misc_feature (39)..(39): n is a, c, g, or t
  misc_feature (42)..(43): n is a, c, g, or t
  misc_feature (51)..(51): n is a, c, g, or t
  misc_feature (57)..(58): n is a, c, g, or t
  misc_feature (64)..(64): n is a, c, g, or t
  misc_feature (67)..(67): n is a, c, g, or t
  misc_feature (75)..(75): n is a, c, g, or t
  misc_feature (86)..(86): n is a, c, g, or t
  misc_feature (93)..(93): n is a, c, g, or t
  misc_feature (101)..(101): n is a, c, g, or t
  misc_feature (105)..(106): n is a, c, g, or t
  misc_feature (108)..(108): n is a, c, g, or t
  misc_feature (114)..(114): n is a, c, g, or t
  misc_feature (116)..(116): n is a, c, g, or t
  misc_feature (119)..(119): n is a, c, g, or t
  misc_feature (132)..(132): n is a, c, g, or t
  misc_feature (141)..(141): n is a, c, g, or t
  misc_feature (143)..(143): n is a, c, g, or t
  misc_feature (145)..(145): n is a, c, g, or t
  misc_feature (150)..(150): n is a, c, g, or t
  misc_feature (157)..(157): n is a, c, g, or t
  misc_feature (167)..(167): n is a, c, g, or t
  misc_feature (173)..(174): n is a, c, g, or t
  misc_feature (180)..(180): n is a, c, g, or t
  misc_feature (185)..(185): n is a, c, g, or t
  misc_feature (202)..(202): n is a, c, g, or t
  misc_feature (204)..(204): n is a, c, g, or t
  misc_feature (207)..(207): n is a, c, g, or t
  misc_feature (212)..(213): n is a, c, g, or t
  misc_feature (216)..(217): n is a, c, g, or t
  misc_feature (227)..(227): n is a, c, g, or t
  misc_feature (229)..(229): n is a, c, g, or t
  misc_feature (231)..(231): n is a, c, g, or t
  misc_feature (233)..(233): n is a, c, g, or t
  misc_feature (235)..(235): n is a, c, g, or t
  misc_feature (238)..(238): n is a, c, g, or t
  misc_feature (251)..(251): n is a, c, g, or t
  misc_feature (254)..(254): n is a, c, g, or t
  misc_feature (260)..(262): n is a, c, g, or t
  misc_feature (265)..(265): n is a, c, g, or t
  misc_feature (268)..(268): n is a, c, g, or t
  misc_feature (275)..(275): n is a, c, g, or t
  misc_feature (282)..(282): n is a, c, g, or t
  misc_feature (285)..(285): n is a, c, g, or t
  misc_feature (291)..(291): n is a, c, g, or t
  misc_feature (301)..(304): n is a, c, g, or t
  misc_feature (307)..(307): n is a, c, g, or t
  misc_feature (309)..(309): n is a, c, g, or t
  misc_feature (313)..(315): n is a, c, g, or t
  misc_feature (319)..(319): n is a, c, g, or t
  misc_feature (338)..(338): n is a, c, g, or t
  misc_feature (340)..(340): n is a, c, g, or t
  misc_feature (347)..(347): n is a, c, g, or t
  misc_feature (350)..(350): n is a, c, g, or t
  misc_feature (354)..(354): n is a, c, g, or t
  misc_feature (360)..(360): n is a, c, g, or t
  misc_feature (362)..(362): n is a, c, g, or t
  misc_feature (371)..(372): n is a, c, g, or t
  misc_feature (377)..(378): n is a, c, g, or t
  misc_feature (384)..(384): n is a, c, g, or t
  misc_feature (386)..(386): n is a, c, g, or t
  misc_feature (390)..(390): n is a, c, g, or t
  misc_feature (394)..(395): n is a, c, g, or t
  misc_feature (398)..(398): n is a, c, g, or t
  misc_feature (405)..(405): n is a, c, g, or t
  misc_feature (439)..(439): n is a, c, g, or t
  misc_feature (448)..(448): n is a, c, g, or t
  misc_feature (451)..(451): n is a, c, g, or t
  misc_feature (455)..(457): n is a, c, g, or t
  misc_feature (461)..(462): n is a, c, g, or t
  misc_feature (476)..(476): n is a, c, g, or t
  misc_feature (480)..(482): n is a, c, g, or t
  misc_feature (487)..(488): n is a, c, g, or t
  misc_feature (494)..(494): n is a, c, g, or t
  misc_feature (496)..(496): n is a, c, g, or t
  misc_feature (500)..(501): n is a, c, g, or t
  misc_feature (504)..(504): n is a, c, g, or t
  misc_feature (511)..(512): n is a, c, g, or t
  misc_feature (518)..(518): n is a, c, g, or t
  misc_feature (525)..(527): n is a, c, g, or t
  misc_feature (532)..(533): n is a, c, g, or t
  misc_feature (539)..(539): n is a, c, g, or t
  misc_feature (550)..(550): n is a, c, g, or t
  misc_feature (568)..(570): n is a, c, g, or t
  misc_feature (590)..(590): n is a, c, g, or t
  misc_feature (592)..(592): n is a, c, g, or t
  misc_feature (594)..(594): n is a, c, g, or t
  misc_feature (597)..(597): n is a, c, g, or t
  misc_feature (601)..(601): n is a, c, g, or t
  misc_feature (608)..(608): n is a, c, g, or t
  misc_feature (610)..(610): n is a, c, g, or t
  misc_feature (617)..(618): n is a, c, g, or t
  misc_feature (622)..(622): n is a, c, g, or t
  misc_feature (624)..(624): n is a, c, g, or t
  misc_feature (626)..(626): n is a, c, g, or t
  misc_feature (630)..(630): n is a, c, g, or t
  misc_feature (636)..(636): n is a, c, g, or t
  misc_feature (641)..(641): n is a, c, g, or t
  misc_feature (648)..(648): n is a, c, g, or t
  misc_feature (654)..(654): n is a, c, g, or t
  misc_feature (661)..(661): n is a, c, g, or t
  misc_feature (668)..(669): n is a, c, g, or t
  misc_feature (677)..(679): n is a, c, g, or t
  misc_feature (686)..(687): n is a, c, g, or t
  misc_feature (691)..(692): n is a, c, g, or t
  misc_feature (697)..(697): n is a, c, g, or t
  misc_feature (702)..(703): n is a, c, g, or t
  misc_feature (709)..(709): n is a, c, g, or t
  misc_feature (716)..(717): n is a, c, g, or t
  misc_feature (730)..(732): n is a, c, g, or t
  misc_feature (741)..(742): n is a, c, g, or t
  misc_feature (744)..(744): n is a, c, g, or t
  misc_feature (746)..(746): n is a, c, g, or t
  misc_feature (749)..(750): n is a, c, g, or t
  misc_feature (752)..(752): n is a, c, g, or t
  misc_feature (754)..(755): n is a, c, g, or t
  misc_feature (764)..(764): n is a, c, g, or t
  misc_feature (767)..(768): n is a, c, g, or t
  misc_feature (772)..(772): n is a, c, g, or t
  misc_feature (775)..(777): n is a, c, g, or t
  misc_feature (780)..(780): n is a, c, g, or t
  misc_feature (783)..(783): n is a, c, g, or t
  misc_feature (786)..(786): n is a, c, g, or t
  misc_feature (791)..(792): n is a, c, g, or t
  misc_feature (794)..(794): n is a, c, g, or t
  misc_feature (797)..(798): n is a, c, g, or t
  misc_feature (803)..(803): n is a, c, g, or t
  misc_feature (808)..(808): n is a, c, g, or t
  misc_feature (814)..(814): n is a, c, g, or t
  misc_feature (818)..(818): n is a, c, g, or t
  misc_feature (820)..(820): n is a, c, g, or t
  misc_feature (822)..(823): n is a, c, g, or t
  misc_feature (826)..(826): n is a, c, g, or t
  misc_feature (831)..(832): n is a, c, g, or t
  misc_feature (834)..(834): n is a, c, g, or t
  misc_feature (837)..(837): n is a, c, g, or t
  misc_feature (841)..(841): n is a, c, g, or t
  misc_feature (847)..(847): n is a, c, g, or t
  misc_feature (856)..(857): n is a, c, g, or t
  misc_feature (861)..(861): n is a, c, g, or t
  misc_feature (867)..(867): n is a, c, g, or t
  misc_feature (869)..(869): n is a, c, g, or t
  misc_feature (873)..(873): n is a, c, g, or t
  misc_feature (876)..(876): n is a, c, g, or t
  misc_feature (883)..(883): n is a, c, g, or t
  misc_feature (892)..(892): n is a, c, g, or t
  misc_feature (896)..(896): n is a, c, g, or t
  misc_feature (898)..(899): n is a, c, g, or t
  misc_feature (902)..(904): n is a, c, g, or t
  misc_feature (906)..(907): n is a, c, g, or t
  misc_feature (915)..(916): n is a, c, g, or t
  misc_feature (919)..(920): n is a, c, g, or t
  misc_feature (922)..(922): n is a, c, g, or t
  misc_feature (930)..(931): n is a, c, g, or t
  misc_feature (935)..(935): n is a, c, g, or t
  misc_feature (940)..(941): n is a, c, g, or t
  misc_feature (946)..(946): n is a, c, g, or t
  misc_feature (954)..(954): n is a, c, g, or t
  misc_feature (958)..(958): n is a, c, g, or t
  misc_feature (961)..(961): n is a, c, g, or t
  misc_feature (965)..(965): n is a, c, g, or t
  misc_feature (967)..(967): n is a, c, g, or t
  misc_feature (974)..(974): n is a, c, g, or t
  misc_feature (983)..(984): n is a, c, g, or t
  misc_feature (993)..(993): n is a, c, g, or t
  misc_feature (1008)..(1009): n is a, c, g, or t
  misc_feature (1012)..(1012): n is a, c, g, or t
  misc_feature (1015)..(1015): n is a, c, g, or t
  misc_feature (1017)..(1020): n is a, c, g, or t
  misc_feature (1028)..(1032): n is a, c, g, or t
  misc_feature (1034)..(1034): n is a, c, g, or t
  misc_feature (1050)..(1051): n is a, c, g, or t
  misc_feature (1054)..(1054): n is a, c, g, or t
  misc_feature (1056)..(1057): n is a, c, g, or t
  misc_feature (1060)..(1060): n is a, c, g, or t
  misc_feature (1063)..(1064): n is a, c, g, or t
  misc_feature (1066)..(1066): n is a, c, g, or t
  misc_feature (1087)..(1087): n is a, c, g, or t
  misc_feature (1089)..(1090): n is a, c, g, or t
  misc_feature (1095)..(1095): n is a, c, g, or t
  misc_feature (1100)..(1100): n is a, c, g, or t
  misc_feature (1103)..(1103): n is a, c, g, or t
  misc_feature (1105)..(1105): n is a, c, g, or t
  misc_feature (1109)..(1109): n is a, c, g, or t
  misc_feature (1119)..(1119): n is a, c, g, or t
  misc_feature (1121)..(1121): n is a, c, g, or t
  misc_feature (1125)..(1128): n is a, c, g, or t
  misc_feature (1134)..(1135): n is a, c, g, or t
  misc_feature (1142)..(1142): n is a, c, g, or t
  misc_feature (1150)..(1151): n is a, c, g, or t
  misc_feature (1154)..(1154): n is a, c, g, or t
  misc_feature (1156)..(1156): n is a, c, g, or t
  misc_feature (1159)..(1159): n is a, c, g, or t
  misc_feature (1163)..(1164): n is a, c, g, or t
  misc_feature (1166)..(1167): n is a, c, g, or t
  misc_feature (1169)..(1169): n is a, c, g, or t
  misc_feature (1178)..(1178): n is a, c, g, or t
  misc_feature (1180)..(1180): n is a, c, g, or t
  misc_feature (1184)..(1184): n is a, c, g, or t
  misc_feature (1188)..(1188): n is a, c, g, or t
  misc_feature (1192)..(1192): n is a, c, g, or t
  misc_feature (1194)..(1194): n is a, c, g, or t
atantangnggaaatttttctgtgngggggngggtctcnccnncaccatcngggatnntatttnggngacaatanaaaatcgatcnacccacncgctccgnccanntntttgantnaanggtgcagaatcgnaacaatgcnantnaacgnctcacanagcagcgttnggatcnntttacngcccnccgtctagtgcatacancncantgtgnngcnngatgagggancngncngngangattgacgtaacncanagcggnnngtnagnagatgantaaggtnatngccctntgacctgcgnnnnatntngctnnngcangctgccattcactgccatngnatgacgnatnacanatcaantncacaggtannctccnncgtttnantagnaagnnagnatccaangcctcatcgacacgtttgagaggggaccggctcnctcccatgnggntatnnnaatnntagttatctgagcnagtnnntctcnntttacncnttgnngcnaatgcanncatccnggttcannntcggnnattccnaagaatcgcanttgagagcaggatcgtgnnnttattcatgaaaaaccttangntntgnggtngaatccntnaccaacnnctangncnggtnaaaagncctanctatacntgcttntcggcanataacannccctgaannncatcacnnatgnncacgntaacnnactatntgaagannacaccccctactnnntgtttcctnngntnccnntnanncgagaaccngannttcngcnnngtntcngcnagccnnanttnnaaacncttgnaaaatnaacnangnnccnaaaanntntgntacnggtttnttattccanngttntgactncnttcncangaaaaanttcttcccngcanannttnnncnnaatacatnnaannancggaaatnncccnttcannagctnccccccantttnacncttngntggaaanagtttcccnngaaccaaanagaaaccttttttcnnttntcntnnnnagttaaannnnnanggtccattttgtggtnnttncnntangcnntntttgtcctcccaatttggggntnnattcnataanttntnattncccttcttcncnaatnnnntttcannttaaaantttatttnnagncntgngccnncnncntagggaggngnaaangaantttnanaaaaac

SEQ ID NO: 826 - DNA, 1372 bp, Homo Sapiens
  misc_feature (949)..(949): n is a, c, g, or t
  misc_feature (961)..(961): n is a, c, g, or t
  misc_feature (970)..(970): n is a, c, g, or t
  misc_feature (1003)..(1003): n is a, c, g, or t
  misc_feature (1022)..(1022): n is a, c, g, or t
  misc_feature (1043)..(1043): n is a, c, g, or t
  misc_feature (1047)..(1047): n is a, c, g, or t
  misc_feature (1059)..(1059): n is a, c, g, or t
  misc_feature (1067)..(1067): n is a, c, g, or t
  misc_feature (1102)..(1102): n is a, c, g, or t
  misc_feature (1104)..(1104): n is a, c, g, or t
  misc_feature (1107)..(1107): n is a, c, g, or t
  misc_feature (1134)..(1134): n is a, c, g, or t
  misc_feature (1136)..(1136): n is a, c, g, or t
  misc_feature (1165)..(1166): n is a, c, g, or t
  misc_feature (1169)..(1169): n is a, c, g, or t
  misc_feature (1173)..(1173): n is a, c, g, or t
  misc_feature (1180)..(1180): n is a, c, g, or t
  misc_feature (1194)..(1194): n is a, c, g, or t
  misc_feature (1196)..(1196): n is a, c, g, or t
  misc_feature (1201)..(1201): n is a, c, g, or t
  misc_feature (1207)..(1208): n is a, c, g, or t
  misc_feature (1211)..(1211): n is a, c, g, or t
  misc_feature (1213)..(1213): n is a, c, g, or t
  misc_feature (1216)..(1217): n is a, c, g, or t
  misc_feature (1225)..(1226): n is a, c, g, or t
  misc_feature (1231)..(1231): n is a, c, g, or t
  misc_feature (1234)..(1234): n is a, c, g, or t
  misc_feature (1237)..(1237): n is a, c, g, or t
  misc_feature (1240)..(1241): n is a, c, g, or t
  misc_feature (1245)..(1246): n is a, c, g, or t
  misc_feature (1256)..(1256): n is a, c, g, or t
  misc_feature (1259)..(1260): n is a, c, g, or t
  misc_feature (1283)..(1283): n is a, c, g, or t
  misc_feature (1290)..(1290): n is a, c, g, or t
  misc_feature (1296)..(1296): n is a, c, g, or t
  misc_feature (1302)..(1302): n is a, c, g, or t
  misc_feature (1306)..(1307): n is a, c, g, or t
  misc_feature (1310)..(1310): n is a, c, g, or t
  misc_feature (1313)..(1314): n is a, c, g, or t
  misc_feature (1320)..(1320): n is a, c, g, or t
  misc_feature (1322)..(1322): n is a, c, g, or t
  misc_feature (1325)..(1325): n is a, c, g, or t
  misc_feature (1327)..(1327): n is a, c, g, or t
  misc_feature (1348)..(1348): n is a, c, g, or t
  misc_feature (1351)..(1351): n is a, c, g, or t
  misc_feature (1366)..(1366): n is a, c, g, or t
tagagaaattactatgagaggatcgcatcaccatcaccatcacggatcctatttaggtgacactatagaatcgtcgacccacgcgtccggtcgcgtgcgggaggcgggccgcgatcttgcgcagggtcggtgtgggcgcaggctgcggcgccgcgactcgtgcgggtaggcgtctgcgctcggtttgagggctcggcgcggggtttcctgttccttcttctgcgcggctgcagctcgggacttcggcctgacccagcccccatggcttcagaagagctacagaaagatctagaagaggtaaaggtgttgctggaaaaggctactaggaaaagagtacgtgatgcccttacagctgaaaaatccaagattgagacagaaatcaagaacaagatgcaacagaaatcacagaagaaagcagaacttcttgataatgaaaaaccagctgctgtggttgctcccattacaacgggctatacggtgaaaatcagtaattatggatgggatcagtcagataagtttgtgaaaatctacattaccttaactggagttcatcaagttcccactgagaatgtgcaggtgcatttcacagagaggtcatttgatcttttggtaaagaatctaaatgggaagagttactccatgattgtgaacaatctcttgaaacccatctctgtggaaggcagttcaaaaaaagtcaagactgatacagttcttatattgtgtagaaagaaagtggaaaacacaaggtgggattacctgacccaggttgaaaaggagtgcaaagaaaaagagaagccctcctatgacactgaaacagatcctagtgagggattgatgaatgttctaaagaaaatttatgaagatggagacgatgatatgaagcgaaccattaataaagcctgggtggaatcaagagagaagcaagccaaaggagacacggaattttganactttaaagtcntttgggganctgtgatgtgatgtggaaatactgatgtttccngtaagggaaaattggtganctgcatatataaatttgaaanaaanctatttacatancctccaantaaaggcaatgaattccccatttcctactgggagnanttntttaaataaaatatgcttttttaaacncncccgcaaaaaaaaaaaaaggggcgccccnnccnaaangggagcnaaataaccttaatnanctaancttgannccngnttnnaaatcccnnaaggnccnccnaanncctnnggatttttcnaanncccggttcccccggggttttttnttggggnaaaccncctacntggnnaanttnngggccnangancnaaatgggaaaaaaacccgggnaancccccttaattcccngggccc

SEQ ID NO: 827 - DNA, 1301 bp, Homo Sapiens
  misc_feature (5)..(5): n is a, c, g, or t
  misc_feature (9)..(9): n is a, c, g, or t
  misc_feature (11)..(11): n is a, c, g, or t
  misc_feature (32)..(32): n is a, c, g, or t
  misc_feature (793)..(793): n is a, c, g, or t
  misc_feature (796)..(796): n is a, c, g, or t
  misc_feature (801)..(802): n is a, c, g, or t
  misc_feature (804)..(806): n is a, c, g, or t
  misc_feature (809)..(812): n is a, c, g, or t
  misc_feature (814)..(818): n is a, c, g, or t
  misc_feature (820)..(821): n is a, c, g, or t
  misc_feature (823)..(824): n is a, c, g, or t
  misc_feature (826)..(828): n is a, c, g, or t
  misc_feature (831)..(831): n is a, c, g, or t
  misc_feature (833)..(837): n is a, c, g, or t
  misc_feature (840)..(840): n is a, c, g, or t
  misc_feature (842)..(846): n is a, c, g, or t
  misc_feature (848)..(853): n is a, c, g, or t
  misc_feature (855)..(858): n is a, c, g, or t
  misc_feature (860)..(862): n is a, c, g, or t
  misc_feature (864)..(864): n is a, c, g, or t
  misc_feature (866)..(866): n is a, c, g, or t
  misc_feature (868)..(874): n is a, c, g, or t
  misc_feature (876)..(878): n is a, c, g, or t
  misc_feature (881)..(881): n is a, c, g, or t
  misc_feature (883)..(883): n is a, c, g, or t
  misc_feature (885)..(886): n is a, c, g, or t
  misc_feature (888)..(889): n is a, c, g, or t
  misc_feature (892)..(892): n is a, c, g, or t
  misc_feature (894)..(896): n is a, c, g, or t
  misc_feature (898)..(900): n is a, c, g, or t
  misc_feature (902)..(903): n is a, c, g, or t
  misc_feature (905)..(907): n is a, c, g, or t
  misc_feature (909)..(911): n is a, c, g, or t
  misc_feature (914)..(914): n is a, c, g, or t
  misc_feature (916)..(918): n is a, c, g, or t
  misc_feature (920)..(921): n is a, c, g, or t
  misc_feature (923)..(923): n is a, c, g, or t
  misc_feature (925)..(929): n is a, c, g, or t
  misc_feature (931)..(931): n is a, c, g, or t
  misc_feature (934)..(935): n is a, c, g, or t
  misc_feature (939)..(940): n is a, c, g, or t
  misc_feature (944)..(944): n is a, c, g, or t
  misc_feature (948)..(952): n is a, c, g, or t
  misc_feature (954)..(954): n is a, c, g, or t
  misc_feature (959)..(960): n is a, c, g, or t
  misc_feature (962)..(963): n is a, c, g, or t
  misc_feature (965)..(969): n is a, c, g, or t
  misc_feature (971)..(978): n is a, c, g, or t
  misc_feature (980)..(980): n is a, c, g, or t
  misc_feature (983)..(986): n is a, c, g, or t
  misc_feature (995)..(995): n is a, c, g, or t
  misc_feature (997)..(998): n is a, c, g, or t
  misc_feature (1000)..(1003): n is a, c, g, or t
  misc_feature (1006)..(1007): n is a, c, g, or t
  misc_feature (1009)..(1009): n is a, c, g, or t
  misc_feature (1013)..(1013): n is a, c, g, or t
  misc_feature (1015)..(1017): n is a, c, g, or t
  misc_feature (1023)..(1023): n is a, c, g, or t
  misc_feature (1025)..(1027): n is a, c, g, or t
  misc_feature (1030)..(1031): n is a, c, g, or t
  misc_feature (1033)..(1040): n is a, c, g, or t
  misc_feature (1047)..(1049): n is a, c, g, or t
  misc_feature (1053)..(1056): n is a, c, g, or t
  misc_feature (1059)..(1059): n is a, c, g, or t
  misc_feature (1063)..(1063): n is a, c, g, or t
  misc_feature (1068)..(1068): n is a, c, g, or t
  misc_feature (1071)..(1072): n is a, c, g, or t
  misc_feature (1080)..(1081): n is a, c, g, or t
  misc_feature (1083)..(1085): n is a, c, g, or t
  misc_feature (1088)..(1088): n is a, c, g, or t
  misc_feature (1091)..(1091): n is a, c, g, or t
  misc_feature (1093)..(1096): n is a, c, g, or t
  misc_feature (1099)..(1100): n is a, c, g, or t
  misc_feature (1103)..(1104): n is a, c, g, or t
  misc_feature (1106)..(1108): n is a, c, g, or t
  misc_feature (1112)..(1112): n is a, c, g, or t
  misc_feature (1116)..(1117): n is a, c, g, or t
  misc_feature (1119)..(1121): n is a, c, g, or t
  misc_feature (1123)..(1126): n is a, c, g, or t
  misc_feature (1132)..(1136): n is a, c, g, or t
  misc_feature (1139)..(1139): n is a, c, g, or t
  misc_feature (1141)..(1142): n is a, c, g, or t
  misc_feature (1145)..(1146): n is a, c, g, or t
  misc_feature (1149)..(1149): n is a, c, g, or t
  misc_feature (1152)..(1152): n is a, c, g, or t
  misc_feature (1155)..(1155): n is a, c, g, or t
  misc_feature (1159)..(1160): n is a, c, g, or t
  misc_feature (1164)..(1164): n is a, c, g, or t
  misc_feature (1169)..(1169): n is a, c, g, or t
  misc_feature (1176)..(1176): n is a, c, g, or t
  misc_feature (1178)..(1182): n is a, c, g, or t
  misc_feature (1184)..(1187): n is a, c, g, or t
  misc_feature (1189)..(1189): n is a, c, g, or t
  misc_feature (1191)..(1193): n is a, c, g, or t
  misc_feature (1200)..(1201): n is a, c, g, or t
  misc_feature (1204)..(1204): n is a, c, g, or t
  misc_feature (1207)..(1207): n is a, c, g, or t
  misc_feature (1211)..(1216): n is a, c, g, or t
  misc_feature (1222)..(1223): n is a, c, g, or t
  misc_feature (1225)..(1225): n is a, c, g, or t
  misc_feature (1229)..(1230): n is a, c, g, or t
  misc_feature (1232)..(1233): n is a, c, g, or t
  misc_feature (1243)..(1243): n is a, c, g, or t
  misc_feature (1245)..(1247): n is a, c, g, or t
  misc_feature (1250)..(1254): n is a, c, g, or t
  misc_feature (1257)..(1258): n is a, c, g, or t
  misc_feature (1260)..(1263): n is a, c, g, or t
  misc_feature (1265)..(1265): n is a, c, g, or t
  misc_feature (1267)..(1267): n is a, c, g, or t
  misc_feature (1269)..(1272): n is a, c, g, or t
  misc_feature (1274)..(1276): n is a, c, g, or t
  misc_feature (1280)..(1280): n is a, c, g, or t
  misc_feature (1282)..(1282): n is a, c, g, or t
  misc_feature (1284)..(1284): n is a, c, g, or t
  misc_feature (1286)..(1287): n is a, c, g, or t
  misc_feature (1289)..(1293): n is a, c, g, or t
  misc_feature (1295)..(1296): n is a, c, g, or t
  misc_feature (1298)..(1300): n is a, c, g, or t
ttagnggananttacctgtgaggaggatcgcntcaccatcaccatcacgggatcctatttaggtgacactatagaatcgtcgacccacgcgtccggctcagtgctctctccactaccccacaccagccttggtgccaccaaaagtgctccccaaaaggaaggagaatgggatttttcttttgaggcatgcacatctggaattaaggtcaaactaattctcacatccctctaaactactgttaggaacagcagtgttctcacagtgtggggcagccgtccttctaatgaagacaatgatattgacactgtccctctttggcagttgcattagtaactttgaaaggtatatgactgagcgtagcatacaggttaacctgcagaaacagtacttaggtaattgtagggcgaggattataaatgaaatttgcaaaatcacttagcagcaactgaagacaattatcaaccacgtggagaaaatcaaaccgagcagggctgtgtgaaacatggttgtaatatgcgactgcgaacactgaactctacgccactccacaaatgatgttttcaggtgtcatggactgttgccaccatgtattcatccagagttcttaaagtttaaagttgcacatgattgtataagcatgctttctttgagttttaaattatgtataaacataagttgcatttagaaatcaagcataaatcacttcaactgctcttctgtagttcttggatttcttttcccttttgactttgaataaatgtaaaaatcctttcagccggaaaaaaaaaaaanaanaaaannannnaannnnannnnnannannannnaanannnnnganannnnncnnnnnntnnnnannncncncnnnnnnnannncgnangnncnnaantnnnannnanngnnncnnntgncnnngnncnannnnnangtnnaaanncacnatcnnnnncntgganntnncnnnnncnnnnnnnncnctnnnnttttgtaantnngnnnnccnngngcgntnnnaagganannngannannnnnnnnaacaaannnaaannnnaangacnaccanaanncatagccnncnnnaanaanannnnaannttnngnnnacanaccnngnnngnnnncagcannnnnccnannggnnganagnatnccannatgnagtanacaaaanannnnnannnngncnnnaacaaanntcncanaacnnnnnngatacnncntccnntnntcttgtacanannngannnnncannannnntncngnnnncnnnaaantntncnncnnnnnannannnc

SEQ ID NO: 828 - DNA, 1421 bp, Homo Sapiens
  misc_feature (1)..(2): n is a, c, g, or t
  misc_feature (5)..(5): n is a, c, g, or t
  misc_feature (9)..(9): n is a, c, g, or t
  misc_feature (702)..(702): n is a, c, g, or t
  misc_feature (802)..(802): n is a, c, g, or t
  misc_feature (834)..(834): n is a, c, g, or t
  misc_feature (852)..(852): n is a, c, g, or t
  misc_feature (870)..(870): n is a, c, g, or t
  misc_feature (872)..(872): n is a, c, g, or t
  misc_feature (878)..(878): n is a, c, g, or t
  misc_feature (882)..(882): n is a, c, g, or t
  misc_feature (884)..(884): n is a, c, g, or t
  misc_feature (887)..(887): n is a, c, g, or t
  misc_feature (903)..(903): n is a, c, g, or t
  misc_feature (915)..(915): n is a, c, g, or t
  misc_feature (919)..(919): n is a, c, g, or t
  misc_feature (923)..(923): n is a, c, g, or t
  misc_feature (937)..(937): n is a, c, g, or t
  misc_feature (943)..(943): n is a, c, g, or t
  misc_feature (946)..(946): n is a, c, g, or t
  misc_feature (950)..(950): n is a, c, g, or t
  misc_feature (952)..(953): n is a, c, g, or t
  misc_feature (955)..(956): n is a, c, g, or t
  misc_feature (982)..(982): n is a, c, g, or t
  misc_feature (986)..(986): n is a, c, g, or t
  misc_feature (995)..(995): n is a, c, g, or t
  misc_feature (998)..(998): n is a, c, g, or t
  misc_feature (1004)..(1005): n is a, c, g, or t
  misc_feature (1008)..(1008): n is a, c, g, or t
  misc_feature (1010)..(1011): n is a, c, g, or t
  misc_feature (1022)..(1022): n is a, c, g, or t
  misc_feature (1025)..(1025): n is a, c, g, or t
  misc_feature (1027)..(1027): n is a, c, g, or t
  misc_feature (1029)..(1029): n is a, c, g, or t
  misc_feature (1039)..(1039): n is a, c, g, or t
  misc_feature (1049)..(1051): n is a, c, g, or t
  misc_feature (1053)..(1053): n is a, c, g, or t
  misc_feature (1056)..(1057): n is a, c, g, or t
  misc_feature (1066)..(1067): n is a, c, g, or t
  misc_feature (1069)..(1069): n is a, c, g, or t
  misc_feature (1074)..(1075): n is a, c, g, or t
  misc_feature (1077)..(1078): n is a, c, g, or t
  misc_feature (1084)..(1084): n is a, c, g, or t
  misc_feature (1089)..(1090): n is a, c, g, or t
  misc_feature (1094)..(1094): n is a, c, g, or t
  misc_feature (1097)..(1097): n is a, c, g, or t
  misc_feature (1103)..(1103): n is a, c, g, or t
  misc_feature (1108)..(1108): n is a, c, g, or t
  misc_feature (1112)..(1112): n is a, c, g, or t
  misc_feature (1127)..(1127): n is a, c, g, or t
  misc_feature (1135)..(1135): n is a, c, g, or t
  misc_feature (1141)..(1141): n is a, c, g, or t
  misc_feature (1143)..(1143): n is a, c, g, or t
  misc_feature (1161)..(1161): n is a, c, g, or t
  misc_feature (1170)..(1170): n is a, c, g, or t
  misc_feature (1174)..(1174): n is a, c, g, or t
  misc_feature (1176)..(1177): n is a, c, g, or t
  misc_feature (1179)..(1179): n is a, c, g, or t
  misc_feature (1181)..(1181): n is a, c, g, or t
  misc_feature (1184)..(1185): n is a, c, g, or t
  misc_feature (1193)..(1193): n is a, c, g, or t
  misc_feature (1195)..(1195): n is a, c, g, or t
  misc_feature (1197)..(1198): n is a, c, g, or t
  misc_feature (1208)..(1208): n is a, c, g, or t
  misc_feature (1213)..(1213): n is a, c, g, or t
  misc_feature (1221)..(1221): n is a, c, g, or t
  misc_feature (1225)..(1225): n is a, c, g, or t
  misc_feature (1231)..(1231): n is a, c, g, or t
  misc_feature (1239)..(1239): n is a, c, g, or t
  misc_feature (1245)..(1246): n is a, c, g, or t
  misc_feature (1249)..(1249): n is a, c, g, or t
  misc_feature (1252)..(1254): n is a, c, g, or t
  misc_feature (1257)..(1257): n is a, c, g, or t
  misc_feature (1261)..(1261): n is a, c, g, or t
  misc_feature (1266)..(1268): n is a, c, g, or t
  misc_feature (1271)..(1271): n is a, c, g, or t
  misc_feature (1274)..(1275): n is a, c, g, or t
  misc_feature (1285)..(1286): n is a, c, g, or t
  misc_feature (1288)..(1288): n is a, c, g, or t
  misc_feature (1291)..(1293): n is a, c, g, or t
  misc_feature (1297)..(1297): n is a, c, g, or t
  misc_feature (1300)..(1300): n is a, c, g, or t
  misc_feature (1306)..(1307): n is a, c, g, or t
  misc_feature (1315)..(1315): n is a, c, g, or t
  misc_feature (1317)..(1317): n is a, c, g, or t
  misc_feature (1326)..(1326): n is a, c, g, or t
  misc_feature (1329)..(1329): n is a, c, g, or t
  misc_feature (1331)..(1331): n is a, c, g, or t
  misc_feature (1333)..(1333): n is a, c, g, or t
  misc_feature (1335)..(1335): n is a, c, g, or t
  misc_feature (1346)..(1348): n is a, c, g, or t
  misc_feature (1351)..(1351): n is a, c, g, or t
  misc_feature (1353)..(1353): n is a, c, g, or t
  misc_feature (1368)..(1369): n is a, c, g, or t
  misc_feature (1371)..(1371): n is a, c, g, or t
  misc_feature (1373)..(1373): n is a, c, g, or t
  misc_feature (1376)..(1376): n is a, c, g, or t
  misc_feature (1382)..(1383): n is a, c, g, or t
  misc_feature (1389)..(1389): n is a, c, g, or t
  misc_feature (1397)..(1398): n is a, c, g, or t
  misc_feature (1406)..(1406): n is a, c, g, or t
  misc_feature (1420)..(1421): n is a, c, g, or t
nnacnattnaggaaattactatgagaggatcgcatcaccatcaccatcacggatcctatttaggtgacactatagaatcgtcgacccacgcgtccgcaagcaggttcctaaagcccagaaaggtggaagaagatgagctcttggaaaaatcaccactgcagctagggaatgagcctttgcaacgcttgctcagtgacaatggcatcaacagactatccctcatggcccctgacaccccggccggtaccccacttagtggtgtgggtcgccgcacatcagtcctcttcaagaaggccaagaatggggttaagctacagagaagcccagacagggtcctggagaatggcgaggaccatggtgtggcaggctctcctgcctctccagccagcatcgaggaagagcgccactcccggaagcggccaaggagcaggagctgtagtgagagcgaaggggagaggtccccccagcaggaggaagagacaggcatgaccaacggctttggaaaacacaccgaaagcgggtctgactctgaatgtagtttgggtctcagtggtggactggcatttgaagcttgcagtggtctgacgccccccaaacgcagccgtgggaagccagccctgtctcgagtgcccttcctggaaggtgtgaacggagactctgactacaatggctcaggcagaagcctcctgctgccctttgaanaccgcggagacctggagcccttggagctggtgtgggccaagtgccgaggctacccctcctaccctgccttgatcatcgatcccaaagatgcccccggganggccttcctgcacaatggcgtttcccattccntgtcccccccgctggacnttgcctgaaacttggganancaaaanacangncanaaggctggaaaaaaanctctttctttgntccncttnttttaaaaacaaancgccanctnggcnanngnnctttccaaaggggacaaaattcctgncccnttgggttgntgnaaaaannccngnnggaacaaactnaanantnctggaaaggncccctaaaannncnctnnctccaattnnantggcnngnngggccntttgnncctngcnattttnccccntaancaaaattccgggggnccccactncttttntnactttccgatttaccttnataagggcnaggngnngngnccnntattcctntntnncccctgtccnccaantcccgtangganaaaaanaaaaaccntttttnnccnccnnnccnaatntatgnnncgnganntttccccctnntntannnaaanccngggaanntgtctttncncccccatanggnangngncccctattttnnnacncncgtggttcctttacnngntncgntcttgnnaaaaantctccctnntttccccntggagatatttatnn

SEQ ID NO: 829 - DNA, 1200 bp, Homo Sapiens
  misc_feature (936)..(936): n is a, c, g, or t
  misc_feature (938)..(938): n is a, c, g, or t
  misc_feature (983)..(983): n is a, c, g, or t
  misc_feature (988)..(988): n is a, c, g, or t
  misc_feature (1052)..(1052): n is a, c, g, or t
  misc_feature (1054)..(1054): n is a, c, g, or t
  misc_feature (1067)..(1067): n is a, c, g, or t
  misc_feature (1092)..(1092): n is a, c, g, or t
  misc_feature (1096)..(1096): n is a, c, g, or t
  misc_feature (1098)..(1098): n is a, c, g, or t
  misc_feature (1101)..(1101): n is a, c, g, or t
  misc_feature (1110)..(1111): n is a, c, g, or t
  misc_feature (1117)..(1118): n is a, c, g, or t
  misc_feature (1132)..(1132): n is a, c, g, or t
  misc_feature (1150)..(1150): n is a, c, g, or t
  misc_feature (1156)..(1156): n is a, c, g, or t
  misc_feature (1160)..(1160): n is a, c, g, or t
  misc_feature (1172)..(1172): n is a, c, g, or t
  misc_feature (1177)..(1177): n is a, c, g, or t
  misc_feature (1187)..(1187): n is a, c, g, or t
  misc_feature (1190)..(1190): n is a, c, g, or t
  misc_feature (1192)..(1192): n is a, c, g, or t
  misc_feature (1195)..(1195): n is a, c, g, or t
  misc_feature (1199)..(1199): n is a, c, g, or t
taatagagaaattactatgagaggatcgcatcaccatcaccatcacggatcctatttaggtgacactatagaatcgtcgacccacgcgtccgaagacaaagccactgtgctaaccacggagcgcaagaagagagggaagactgtgcctgaggagctggtgaagccagaagagctcagcaaataccggcaggtggcatcccacgtggggttgcacagtgccagcattcctgggatcctggccctggacctctgcccgtccgacaccaacaagatcctcactggtggggcggataaaaatgtcgttgtgtttgacaaaagttctgaacaaatcctggctaccctcaaaggccataccaagaaggtcaccagcgtggtgtttcacccttcccaggacctggtgttttctgcttcccccgatgccactatcaggatttggtcggtccccaatgcctcttgtgtacaggtggttcgggcccatgagagtgctgtgacaggcctcagccttcatgccactggcgactatctcctgagctcctccgatgatcagtactgggctttctctgacatccagacagggcgtgtgctcaccaaggtgacagatgagacctccggctgctctctcacctgtgcacagttccaccctgacggactcatctttggaacaggaaccatggactctcagatcaagatctgggacttgaaggaacgtactaatgtggccaacttccctggccactcgggccccatcactagcatcgccttctctgagaatggttactacctggctacagcggctgatgactcctctgtcaagctctgggatctgcgcaagcttaagaactttaagactttgcagctggataacaactttgaggtaaagtcactgatctttgaccagagtggtacctacctggctcttgggggcacggaatgtcnanatctacatctgcaaacaatggacggaaattcttcactttacaaancatancggcctgaccacaggggtggccttcgggcatcacgccaagttcatcgcttcaacaggcatggananaaacctcaagttntacagcctgtaggccctggcccttntgangnaanctgggcctnntctccnntaaagggtaaaatnaggtttgggggggggggngggggnaatntttggggggganggggnctttgggggnggnanttncatnt

SEQ ID NO: 830 - DNA, 1392 bp, Homo Sapiens
  misc_feature (9)..(9): n is a, c, g, or t
  misc_feature (623)..(623): n is a, c, g, or t
  misc_feature (625)..(625): n is a, c, g, or t
  misc_feature (628)..(628): n is a, c, g, or t
  misc_feature (644)..(644): n is a, c, g, or t
  misc_feature (676)..(676): n is a, c, g, or t
  misc_feature (679)..(679): n is a, c, g, or t
  misc_feature (725)..(725): n is a, c, g, or t
  misc_feature (740)..(740): n is a, c, g, or t
  misc_feature (743)..(743): n is a, c, g, or t
  misc_feature (746)..(746): n is a, c, g, or t
  misc_feature (749)..(749): n is a, c, g, or t
  misc_feature (757)..(757): n is a, c, g, or t
  misc_feature (764)..(764): n is a, c, g, or t
  misc_feature (775)..(775): n is a, c, g, or t
  misc_feature (798)..(798): n is a, c, g, or t
  misc_feature (806)..(806): n is a, c, g, or t
  misc_feature (816)..(816): n is a, c, g, or t
  misc_feature (818)..(819): n is a, c, g, or t
  misc_feature (829)..(829): n is a, c, g, or t
  misc_feature (835)..(836): n is a, c, g, or t
  misc_feature (839)..(839): n is a, c, g, or t
  misc_feature (848)..(849): n is a, c, g, or t
  misc_feature (852)..(853): n is a, c, g, or t
  misc_feature (867)..(867): n is a, c, g, or t
  misc_feature (871)..(871): n is a, c, g, or t
  misc_feature (874)..(874): n is a, c, g, or t
  misc_feature (885)..(885): n is a, c, g, or t
  misc_feature (889)..(889): n is a, c, g, or t
  misc_feature (906)..(907): n is a, c, g, or t
  misc_feature (910)..(910): n is a, c, g, or t
  misc_feature (925)..(925): n is a, c, g, or t
  misc_feature (932)..(932): n is a, c, g, or t
  misc_feature (938)..(941): n is a, c, g, or t
  misc_feature (943)..(944): n is a, c, g, or t
  misc_feature (947)..(947): n is a, c, g, or t
  misc_feature (951)..(951): n is a, c, g, or t
  misc_feature (953)..(953): n is a, c, g, or t
  misc_feature (958)..(959): n is a, c, g, or t
  misc_feature (963)..(964): n is a, c, g, or t
  misc_feature (966)..(966): n is a, c, g, or t
  misc_feature (968)..(968): n is a, c, g, or t
  misc_feature (974)..(974): n is a, c, g, or t
  misc_feature (977)..(977): n is a, c, g, or t
  misc_feature (986)..(987): n is a, c, g, or t
  misc_feature (989)..(989): n is a, c, g, or t
  misc_feature (992)..(992): n is a, c, g, or t
  misc_feature (994)..(994): n is a, c, g, or t
  misc_feature (999)..(999): n is a, c, g, or t
  misc_feature (1001)..(1001): n is a, c, g, or t
  misc_feature (1004)..(1004): n is a, c, g, or t
  misc_feature (1008)..(1008): n is a, c, g, or t
  misc_feature (1018)..(1018): n is a, c, g, or t
  misc_feature (1022)..(1022): n is a, c, g, or t
  misc_feature (1024)..(1025): n is a, c, g, or t
  misc_feature (1028)..(1028): n is a, c, g, or t
  misc_feature (1031)..(1031): n is a, c, g, or t
  misc_feature (1034)..(1034): n is a, c, g, or t
  misc_feature (1036)..(1036): n is a, c, g, or t
  misc_feature (1038)..(1038): n is a, c, g, or t
  misc_feature (1040)..(1041): n is a, c, g, or t
  misc_feature (1047)..(1047): n is a, c, g, or t
  misc_feature (1050)..(1051): n is a, c, g, or t
  misc_feature (1055)..(1056): n is a, c, g, or t
  misc_feature (1058)..(1059): n is a, c, g, or t
  misc_feature (1063)..(1063): n is a, c, g, or t
  misc_feature (1074)..(1076): n is a, c, g, or t
  misc_feature (1083)..(1085): n is a, c, g, or t
  misc_feature (1088)..(1088): n is a, c, g, or t
  misc_feature (1092)..(1094): n is a, c, g, or t
  misc_feature (1097)..(1097): n is a, c, g, or t
  misc_feature (1101)..(1101): n is a, c, g, or t
  misc_feature (1103)..(1107): n is a, c, g, or t
  misc_feature (1109)..(1109): n is a, c, g, or t
  misc_feature (1111)..(1111): n is a, c, g, or t
  misc_feature (1113)..(1113): n is a, c, g, or t
  misc_feature (1115)..(1118): n is a, c, g, or t
  misc_feature (1121)..(1121): n is a, c, g, or t
  misc_feature (1124)..(1125): n is a, c, g, or t
  misc_feature (1133)..(1133): n is a, c, g, or t
  misc_feature (1136)..(1137): n is a, c, g, or t
  misc_feature (1141)..(1141): n is a, c, g, or t
  misc_feature (1146)..(1147): n is a, c, g, or t
  misc_feature (1154)..(1155): n is a, c, g, or t
  misc_feature (1159)..(1159): n is a, c, g, or t
  misc_feature (1161)..(1165): n is a, c, g, or t
  misc_feature (1169)..(1172): n is a, c, g, or t
  misc_feature (1174)..(1174): n is a, c, g, or t
  misc_feature (1180)..(1180): n is a, c, g, or t
  misc_feature (1183)..(1183): n is a, c, g, or t
  misc_feature (1186)..(1190): n is a, c, g, or t
  misc_feature (1192)..(1192): n is a, c, g, or t
  misc_feature (1197)..(1198): n is a, c, g, or t
  misc_feature (1200)..(1205): n is a, c, g, or t
  misc_feature (1208)..(1208): n is a, c, g, or t
  misc_feature (1211)..(1211): n is a, c, g, or t
  misc_feature (1216)..(1216): n is a, c, g, or t
  misc_feature (1221)..(1223): n is a, c, g, or t
  misc_feature (1227)..(1228): n is a, c, g, or t
  misc_feature (1231)..(1232): n is a, c, g, or t
  misc_feature (1235)..(1236): n is a, c, g, or t
  misc_feature (1238)..(1239): n is a, c, g, or t
  misc_feature (1243)..(1244): n is a, c, g, or t
  misc_feature (1247)..(1247): n is a, c, g, or t
  misc_feature (1251)..(1254): n is a, c, g, or t
  misc_feature (1259)..(1259): n is a, c, g, or t
  misc_feature (1262)..(1263): n is a, c, g, or t
  misc_feature (1268)..(1269): n is a, c, g, or t
  misc_feature (1273)..(1274): n is a, c, g, or t
  misc_feature (1277)..(1280): n is a, c, g, or t
  misc_feature (1288)..(1289): n is a, c, g, or t
  misc_feature (1295)..(1295): n is a, c, g, or t
  misc_feature (1299)..(1300): n is a, c, g, or t
  misc_feature (1302)..(1308): n is a, c, g, or t
  misc_feature (1311)..(1318): n is a, c, g, or t
  misc_feature (1321)..(1324): n is a, c, g, or t
  misc_feature (1326)..(1332): n is a, c, g, or t
  misc_feature (1335)..(1335): n is a, c, g, or t
  misc_feature (1339)..(1342): n is a, c, g, or t
  misc_feature (1345)..(1352): n is a, c, g, or t
  misc_feature (1356)..(1358): n is a, c, g, or t
  misc_feature (1360)..(1360): n is a, c, g, or t
  misc_feature (1362)..(1362): n is a, c, g, or t
  misc_feature (1364)..(1368): n is a, c, g, or t
  misc_feature (1371)..(1374): n is a, c, g, or t
  misc_feature (1380)..(1381): n is a, c, g, or t
  misc_feature (1385)..(1387): n is a, c, g, or t
  misc_feature (1391)..(1391): n is a, c, g, or t
tagagaganttaactatgagaggatcgcatcaccatcaccatcacgggatcctatttaggtgacactatagaatcgtcgacccacgcgtccgctcacattgtggtggatgaaggcatggactatgagcgagccctccgccttctcagactaccccagctgcccccgggtgctcagctggtgaagtcagcctggctgagcttgtgccttcaggagaggaggctggtggatgtagctggattcagcatcttcatccccagtaggtacttggaccatccacagcccagcaaggcagagcaggatgcttctattcctcctggcacccatgaggccctgcttcagacagccctttctcctcctcctcctcccaccaggcctgtgtctcctccccaaaaggcaaaagaggcaccaaacacccaagcccagcccatctctgatgatgaagccagtgatggggaagaaacccaggttagtgcagctgatctggaagccctcatcagtggccactaccccacctcccttgagggagattgtgagcctagcccagcccctgctgtcctggataagtgggtctgtgcacagccctcaagccagaaggcgaccaatcacaacctccatatcacananaanctggaagttctggccnaaaccctacagtgttcagggagacaagtgganggncctgggctatgccaaggccatcaatgccctcaagagcttccataancctgtcacctcgtancangtncanaaaagcancccaagnctttaactctnggctgctgtgtgtggcatgtggntcataccnacggggaaangnnaacctgtggngaagtnnaantgctcatcnntcnnccaaatgggccggncccnccnggggtattttnaccncctccttgaaagttttnnggnaggaagggttcctcnaaaaatnaatttnnnnannccnaaangnaaaanngtcnncnanaaaaanacnttggggggnngnccngnttccnanggncaangggggggggnaccngnnccntgnaantnantnngggggnccnnaaannanntttnccttggcccgnnntaatttnnnggntttnnnaantttnannnnntncntngnnnnccnggnnaaaaaaanggnntaanttttnnaaaaatnncccncnnnnntttnnnntngaaaanccnttnnnnnanggggnncnnnnnnaanttnccccnccccnnnaaannaannttnngnntttnnccncccnnnnaaaanttnnggggnngggnnccnnnnggggggtnnaaaaanaaannannnnnnnccnnnnnnnnaannnncnnnnnnnggnaaannnnccnnnnnnnntttnnnanangnnnnntgnnnnaaaaanncccnnntttnc

SEQ ID NO: 831 - DNA, 1346 bp, Homo Sapiens
  misc_feature (724)..(725): n is a, c, g, or t
  misc_feature (727)..(727): n is a, c, g, or t
  misc_feature (729)..(729): n is a, c, g, or t
  misc_feature (731)..(732): n is a, c, g, or t
  misc_feature (734)..(753): n is a, c, g, or t
  misc_feature (795)..(795): n is a, c, g, or t
  misc_feature (819)..(819): n is a, c, g, or t
  misc_feature (874)..(874): n is a, c, g, or t
  misc_feature (911)..(911): n is a, c, g, or t
  misc_feature (959)..(959): n is a, c, g, or t
  misc_feature (965)..(965): n is a, c, g, or t
  misc_feature (967)..(967): n is a, c, g, or t
  misc_feature (993)..(993): n is a, c, g, or t
  misc_feature (997)..(997): n is a, c, g, or t
  misc_feature (1005)..(1005): n is a, c, g, or t
  misc_feature (1013)..(1013): n is a, c, g, or t
  misc_feature (1017)..(1017): n is a, c, g, or t
  misc_feature (1024)..(1024): n is a, c, g, or t
  misc_feature (1027)..(1029): n is a, c, g, or t
  misc_feature (1034)..(1034): n is a, c, g, or t
  misc_feature (1036)..(1036): n is a, c, g, or t
  misc_feature (1040)..(1040): n is a, c, g, or t
  misc_feature (1042)..(1042): n is a, c, g, or t
  misc_feature (1046)..(1046): n is a, c, g, or t
  misc_feature (1051)..(1051): n is a, c, g, or t
  misc_feature (1060)..(1060): n is a, c, g, or t
  misc_feature (1063)..(1063): n is a, c, g, or t
  misc_feature (1071)..(1071): n is a, c, g, or t
  misc_feature (1076)..(1076): n is a, c, g, or t
  misc_feature (1084)..(1084): n is a, c, g, or t
  misc_feature (1090)..(1090): n is a, c, g, or t
  misc_feature (1092)..(1092): n is a, c, g, or t
  misc_feature (1094)..(1094): n is a, c, g, or t
  misc_feature (1103)..(1103): n is a, c, g, or t
  misc_feature (1112)..(1112): n is a, c, g, or t
  misc_feature (1117)..(1117): n is a, c, g, or t
  misc_feature (1123)..(1123): n is a, c, g, or t
  misc_feature (1130)..(1130): n is a, c, g, or t
  misc_feature (1138)..(1139): n is a, c, g, or t
  misc_feature (1145)..(1146): n is a, c, g, or t
  misc_feature (1149)..(1149): n is a, c, g, or t
  misc_feature (1154)..(1155): n is a, c, g, or t
  misc_feature (1160)..(1160): n is a, c, g, or t
  misc_feature (1167)..(1168): n is a, c, g, or t
  misc_feature (1170)..(1170): n is a, c, g, or t
  misc_feature (1176)..(1176): n is a, c, g, or t
  misc_feature (1182)..(1183): n is a, c, g, or t
  misc_feature (1190)..(1191): n is a, c, g, or t
  misc_feature (1197)..(1197): n is a, c, g, or t
  misc_feature (1207)..(1207): n is a, c, g, or t
  misc_feature (1211)..(1211): n is a, c, g, or t
  misc_feature (1216)..(1216): n is a, c, g, or t
  misc_feature (1218)..(1218): n is a, c, g, or t
  misc_feature (1227)..(1227): n is a, c, g, or t
  misc_feature (1235)..(1235): n is a, c, g, or t
  misc_feature (1239)..(1239): n is a, c, g, or t
  misc_feature (1246)..(1247): n is a, c, g, or t
  misc_feature (1249)..(1249): n is a, c, g, or t
  misc_feature (1251)..(1251): n is a, c, g, or t
  misc_feature (1254)..(1254): n is a, c, g, or t
  misc_feature (1256)..(1256): n is a, c, g, or t
  misc_feature (1262)..(1263): n is a, c, g, or t
  misc_feature (1267)..(1267): n is a, c, g, or t
  misc_feature (1270)..(1271): n is a, c, g, or t
  misc_feature (1279)..(1280): n is a, c, g, or t
  misc_feature (1283)..(1283): n is a, c, g, or t
  misc_feature (1287)..(1288): n is a, c, g, or t
  misc_feature (1299)..(1299): n is a, c, g, or t
  misc_feature (1301)..(1302): n is a, c, g, or t
  misc_feature (1310)..(1314): n is a, c, g, or t
  misc_feature (1322)..(1323): n is a, c, g, or t
  misc_feature (1329)..(1330): n is a, c, g, or t
  misc_feature (1341)..(1341): n is a, c, g, or t
aattagagaaattactatgagaggatcgcatcaccatcaccatcacggatcctatttaggtgacactatagaatcgtcgacccacgcgtccgctacaactcccagggcgtcccggagcaggccaacgggactacgggaagcagcgggcagcggcccgcgggaggcacctcggagatctgggtgcaaaagcccagggttaggaaccgtaggcatgctgcgccccaaggctttgacccaggtgctaagccaagccaacactggaggcgtccagagcaccctgctgctgaataacgagggatcactgctggcctactctggttatggggacactgacgcccgggtcaccgctgccatagccagtaacatctgggccgcctacgaccggaacgggaaccaagcgtttaatgaagacaatctcaaattcatcctcatggactgcatggagggccgtgtagccatcacccgagtggccaaccttctgctgtgtatgtatgccaaggagaccgtgggctttggaatgctcaaggccaaggcccaggctttggtgcagtacctggaggagcccctcacccaagtggcggcatcttaacggcattggtggaagctggggtcagaaaagagaaatgaccatttggaggggcggggcctcctagaagaaccttcttagacaatggggggaggatgggactttgttttttccaagaataaacttcaactcctgtannananannannnnnnnnnnnnnnnnnnnngggcggccgctccctatagtgagtcgtattaagcttaattanctgagcttggactcctgttgatanatccagtaatgacctcaaaactccatctggatttgttcaaaacgctcggttgccnccgggcgttttttattggtgaaaatccaagctagctnggcgagatttttcggagctaaggaagctaaaatggaaaaaaaaaatcnctggantntacccccgttgaattttcccaatggnatcntaaaaaanatttttgngggnttttcantcnnnttgcncnatgnanctanaaccnaaaccgttnacntggaattnacggncctttttnaaaaancngnaaaaaaaanaacccaaanttttntccggnctttttncatttttnncccccnnaanaatgnnctccngaaattnntnaggaantaaaanngggaacnnggaaanggaaaatttncccnttttnanccttttctnaaaaaatnaaanttttttnncntnggnanaaaccnnaaanttnngggttttnnaantatnncaaaggggggntnngaaaaacnnnnntttccaanntttttnnaaaattttttnccccc

SEQ ID NO: 832 - DNA, 1195 bp, Homo Sapiens
  misc_feature (819)..(819): n is a, c, g, or t
  misc_feature (833)..(833): n is a, c, g, or t
  misc_feature (876)..(876): n is a, c, g, or t
  misc_feature (899)..(899): n is a, c, g, or t
  misc_feature (916)..(916): n is a, c, g, or t
  misc_feature (928)..(928): n is a, c, g, or t
  misc_feature (938)..(938): n is a, c, g, or t
  misc_feature (946)..(946): n is a, c, g, or t
  misc_feature (956)..(956): n is a, c, g, or t
  misc_feature (961)..(961): n is a, c, g, or t
  misc_feature (964)..(964): n is a, c, g, or t
  misc_feature (972)..(972): n is a, c, g, or t
  misc_feature (979)..(979): n is a, c, g, or t
  misc_feature (984)..(984): n is a, c, g, or t
  misc_feature (996)..(996): n is a, c, g, or t
  misc_feature (999)..(999): n is a, c, g, or t
  misc_feature (1006)..(1006): n is a, c, g, or t
  misc_feature (1019)..(1019): n is a, c, g, or t
  misc_feature (1028)..(1028): n is a, c, g, or t
  misc_feature (1035)..(1035): n is a, c, g, or t
  misc_feature (1067)..(1068): n is a, c, g, or t
  misc_feature (1071)..(1071): n is a, c, g, or t
  misc_feature (1076)..(1076): n is a, c, g, or t
  misc_feature (1090)..(1090): n is a, c, g, or t
  misc_feature (1094)..(1094): n is a, c, g, or t
  misc_feature (1097)..(1097): n is a, c, g, or t
  misc_feature (1104)..(1104): n is a, c, g, or t
  misc_feature (1111)..(1112): n is a, c, g, or t
  misc_feature (1116)..(1116): n is a, c, g, or t
  misc_feature (1124)..(1124): n is a, c, g, or t
  misc_feature (1136)..(1136): n is a, c, g, or t
  misc_feature (1138)..(1138): n is a, c, g, or t
  misc_feature (1150)..(1150): n is a, c, g, or t
  misc_feature (1155)..(1155): n is a, c, g, or t
  misc_feature (1161)..(1161): n is a, c, g, or t
  misc_feature (1168)..(1168): n is a, c, g, or t
  misc_feature (1171)..(1171): n is a, c, g, or t
  misc_feature (1175)..(1175): n is a, c, g, or t
  misc_feature (1177)..(1177): n is a, c, g, or t
  misc_feature (1179)..(1179): n is a, c, g, or t
  misc_feature (1183)..(1183): n is a, c, g, or t
  misc_feature (1195)..(1195): n is a, c, g, or t
tagagaaattactatgagaggatcgcatcaccatcaccatcacggatcctatttaggtgacactatagaatcgtcgacccacgcgtccggctgctgctgctgctgctgccgctgctgctgcacgaatcgtcgcagcccccagccttgcgcgtcgtcgctacctcctcggacaggtgagaagcagcccagaaattttatgaataagcatcagaagccagtgctaacaggccagcggttcaaaactcggaaaagggatgaaaaagagaaattcgaacccacagtcttcagggatacacttgtccaggggcttaatgaggctggtgatgaccttgaagctgtagccaaatttctggactctacaggctcaagattagattatcgtcgctatgcagacacactcttcgatatcctggtggctggcagtatgcttgcccctggaggaacgcgcatagatgatggtgacaagaccaagatgaccaaccactgtgtgttttcagcaaatgaagatcatgaaaccatccgaaactatgctcaggtcttcaataaactcatcaggagatataagtatttggagaaggcatttgaagatgaaatgaaaaagcttctcctcttccttaaagccttttccgaaacagagcagacaaagttggcgatgctgtcggggattctgctgggcaatggcaccctgcccgccaccatcctcaccagtctcttcaccgacagcttagtcaaagaaggcattgcggcctcatttgctgtcaagcttttcaaagcatggatggcagaaaaagatgccaactctgttacctcgtctttganaaaagccaacttanacaagaggctgcttgaactctttccagttaacagacagagtgnggatcattttgctaaatacttcnctgacgcaggtcttaangagcttttcganttcctccgantccagcantccctgggcnccagnaangaactgcnaaagganctccnggaacgtctttnccnaggatgnccgatcaaggagnggggctttntgtcaanaaaaaatgaaaaggaatgatcttccaaaacanncantgatnggccttttggggantgtntantgaaccntgttgannggtnaaaaaggnaaaaaaaatccnantcgaaggggggnaaatnaatggntcccaanccnaaancnangttncccccccccttn

SEQ ID NO: 833 - DNA, 1397 bp, Homo Sapiens
  misc_feature (1)..(1): n is a, c, g, or t
  misc_feature (6)..(10): n is a, c, g, or t
  misc_feature (14)..(14): n is a, c, g, or t
  misc_feature (24)..(24): n is a, c, g, or t
  misc_feature (734)..(734): n is a, c, g, or t
  misc_feature (739)..(739): n is a, c, g, or t
  misc_feature (757)..(757): n is a, c, g, or t
  misc_feature (803)..(803): n is a, c, g, or t
  misc_feature (818)..(818): n is a, c, g, or t
  misc_feature (825)..(825): n is a, c, g, or t
  misc_feature (827)..(827): n is a, c, g, or t
  misc_feature (832)..(832): n is a, c, g, or t
  misc_feature (842)..(842): n is a, c, g, or t
  misc_feature (854)..(854): n is a, c, g, or t
  misc_feature (861)..(861): n is a, c, g, or t
  misc_feature (872)..(872): n is a, c, g, or t
  misc_feature (888)..(888): n is a, c, g, or t
  misc_feature (895)..(895): n is a, c, g, or t
  misc_feature (909)..(909): n is a, c, g, or t
  misc_feature (919)..(919): n is a, c, g, or t
  misc_feature (925)..(926): n is a, c, g, or t
  misc_feature (932)..(932): n is a, c, g, or t
  misc_feature (944)..(944): n is a, c, g, or t
  misc_feature (947)..(947): n is a, c, g, or t
  misc_feature (957)..(958): n is a, c, g, or t
  misc_feature (960)..(960): n is a, c, g, or t
  misc_feature (962)..(962): n is a, c, g, or t
  misc_feature (970)..(970): n is a, c, g, or t
  misc_feature (972)..(972): n is a, c, g, or t
  misc_feature (992)..(992): n is a, c, g, or t
  misc_feature (1008)..(1008): n is a, c, g, or t
  misc_feature (1013)..(1013): n is a, c, g, or t
  misc_feature (1018)..(1019): n is a, c, g, or t
  misc_feature (1022)..(1023): n is a, c, g, or t
  misc_feature (1032)..(1033): n is a, c, g, or t
  misc_feature (1042)..(1042): n is a, c, g, or t
  misc_feature (1052)..(1052): n is a, c, g, or t
  misc_feature (1061)..(1061): n is a, c, g, or t
  misc_feature (1070)..(1070): n is a, c, g, or t
  misc_feature (1074)..(1074): n is a, c, g, or t
  misc_feature (1091)..(1092): n is a, c, g, or t
  misc_feature (1098)..(1098): n is a, c, g, or t
  misc_feature (1102)..(1104): n is a, c, g, or t
  misc_feature (1106)..(1107): n is a, c, g, or t
  misc_feature (1111)..(1111): n is a, c, g, or t
  misc_feature (1121)..(1121): n is a, c, g, or t
  misc_feature (1132)..(1132): n is a, c, g, or t
  misc_feature (1134)..(1134): n is a, c, g, or t
  misc_feature (1142)..(1143): n is a, c, g, or t
  misc_feature (1150)..(1150): n is a, c, g, or t
  misc_feature (1155)..(1155): n is a, c, g, or t
  misc_feature (1163)..(1165): n is a, c, g, or t
  misc_feature (1173)..(1173): n is a, c, g, or t
  misc_feature (1176)..(1176): n is a, c, g, or t
  misc_feature (1178)..(1178): n is a, c, g, or t
  misc_feature (1183)..(1183): n is a, c, g, or t
  misc_feature (1186)..(1186): n is a, c, g, or t
  misc_feature (1190)..(1190): n is a, c, g, or t
  misc_feature (1193)..(1195): n is a, c, g, or t
  misc_feature (1202)..(1203): n is a, c, g, or t
  misc_feature (1207)..(1207): n is a, c, g, or t
  misc_feature (1215)..(1216): n is a, c, g, or t
  misc_feature (1221)..(1221): n is a, c, g, or t
  misc_feature (1224)..(1225): n is a, c, g, or t
  misc_feature (1228)..(1228): n is a, c, g, or t
  misc_feature (1230)..(1230): n is a, c, g, or t
  misc_feature (1232)..(1232): n is a, c, g, or t
  misc_feature (1236)..(1236): n is a, c, g, or t
  misc_feature (1238)..(1238): n is a, c, g, or t
  misc_feature (1240)..(1240): n is a, c, g, or t
  misc_feature (1242)..(1242): n is a, c, g, or t
  misc_feature (1244)..(1246): n is a, c, g, or t
  misc_feature (1251)..(1252): n is a, c, g, or t
  misc_feature (1269)..(1269): n is a, c, g, or t
  misc_feature (1271)..(1272): n is a, c, g, or t
  misc_feature (1278)..(1279): n is a, c, g, or t
  misc_feature (1287)..(1287): n is a, c, g, or t
  misc_feature (1289)..(1289): n is a, c, g, or t
  misc_feature (1292)..(1292): n is a, c, g, or t
  misc_feature (1296)..(1296): n is a, c, g, or t
  misc_feature (1299)..(1300): n is a, c, g, or t
  misc_feature (1304)..(1309): n is a, c, g, or t
  misc_feature (1312)..(1312): n is a, c, g, or t
  misc_feature (1314)..(1314): n is a, c, g, or t
  misc_feature (1320)..(1322): n is a, c, g, or t
  misc_feature (1324)..(1324): n is a, c, g, or t
  misc_feature (1327)..(1327): n is a, c, g, or t
  misc_feature (1333)..(1334): n is a, c, g, or t
  misc_feature (1336)..(1336): n is a, c, g, or t
  misc_feature (1339)..(1341): n is a, c, g, or t
  misc_feature (1343)..(1343): n is a, c, g, or t
  misc_feature (1356)..(1358): n is a, c, g, or t
  misc_feature (1374)..(1374): n is a, c, g, or t
  misc_feature (1378)..(1378): n is a, c, g, or t
  misc_feature (1382)..(1382): n is a, c, g, or t
  misc_feature (1385)..(1385): n is a, c, g, or t
  misc_feature (1395)..(1396): n is a, c, g, or t
ngtggnnnnncganagagaaattnctatgagaggatcgcatcaccatcaccatcacgggatcctatttaggtgacacttatagaatcgtcgacccacgcgtccgcccacgcgtccgcccacgcgtccgggccccgccggccactgcccacccaacagcagccacagccatcacagaagttagggcgcatccgtgaagatgagggggcagtggcgtcatcaacagtcaaggagcctcctgaggctacagccacacctgagccactctcagatgaggacctacctctggatcctgacctgtatcaggacttctgtgcaggggcctttgatgaccatggcctgccctggatgagcgacacagaagagtccccattcctggaccccgcgctgcggaagagggcagtgaaagtgaagcatgtgaagcgtcgggagaagaagtctgagaagaagaaggaggagcgatacaagcggcatcggcagaagcagaagcacaaggataaatggaaacacccagagagggctgatgccaaggaccctgcgtcactgccccagtgcctggggcccggctgtgtgcgccccgcccagcccagctccaagtattgctcagatgactgtggcatgaagctggcagccaaccgcatctacgagatcctcccccagcgcatccagcagtggcagcagagcccttgcattgctgaagagcacggcaagaagctgctcgaacgcattcgccganagcancagagtgcccgcacccgncttcaggaaatggaacgccgattccatgagcttgaggccatcattntacggtgcccaagcnaccaggntntgccncaaggatgangaagagcaaccnagggttngacagtgaatnaacacaaaacttgcanattcttncttgttgtttcctngtggggcacncccatnnaacccncgtgtttccttngcncccaaaatgnnancntttgctcncncccaaaggtttggggttgtnaaaactgaagtggggncgganccttnntgnnaaacatttnnttgggccanttgggggaanaaaattttnttgtcttgnggtnggtgtcttgggaatggnnttgaancccnnnanncccnaatttccccnccattttggtntncactcccnncccgaantgaanaacccaannntttctttnggntnccttntancccnccnnnccatttnnaagngtaaattnnaggtnacnnacncntnaaanantngngnnnttaanngagggtgtctcaaaaantnngaattnntttattgnanttngttncannttcnnnnnnacncnatcacnnnanaanaaaganncnccnnntnctctcccccctannngccctctcttatctcnaganttcnctngggtctatcnna

SEQ ID NO: 834 - DNA, 1310 bp, Homo Sapiens
  misc_feature (814)..(814): n is a, c, g, or t
  misc_feature (873)..(873): n is a, c, g, or t
  misc_feature (875)..(875): n is a, c, g, or t
  misc_feature (894)..(894): n is a, c, g, or t
  misc_feature (969)..(969): n is a, c, g, or t
  misc_feature (976)..(976): n is a, c, g, or t
  misc_feature (985)..(985): n is a, c, g, or t
  misc_feature (992)..(992): n is a, c, g, or t
  misc_feature (1010)..(1010): n is a, c, g, or t
  misc_feature (1017)..(1017): n is a, c, g, or t
  misc_feature (1021)..(1021): n is a, c, g, or t
  misc_feature (1030)..(1030): n is a, c, g, or t
  misc_feature (1034)..(1034): n is a, c, g, or t
  misc_feature (1040)..(1040): n is a, c, g, or t
  misc_feature (1047)..(1047): n is a, c, g, or t
  misc_feature (1067)..(1067): n is a, c, g, or t
  misc_feature (1072)..(1072): n is a, c, g, or t
  misc_feature (1078)..(1078): n is a, c, g, or t
  misc_feature (1081)..(1081): n is a, c, g, or t
  misc_feature (1085)..(1085): n is a, c, g, or t
  misc_feature (1094)..(1094): n is a, c, g, or t
  misc_feature (1096)..(1096): n is a, c, g, or t
  misc_feature (1103)..(1103): n is a, c, g, or t
  misc_feature (1114)..(1114): n is a, c, g, or t
  misc_feature (1117)..(1117): n is a, c, g, or t
  misc_feature (1120)..(1120): n is a, c, g, or t
  misc_feature (1127)..(1127): n is a, c, g, or t
  misc_feature (1129)..(1129): n is a, c, g, or t
  misc_feature (1139)..(1139): n is a, c, g, or t
  misc_feature (1142)..(1142): n is a, c, g, or t
  misc_feature (1147)..(1147): n is a, c, g, or t
  misc_feature (1154)..(1154): n is a, c, g, or t
  misc_feature (1166)..(1166): n is a, c, g, or t
  misc_feature (1170)..(1170): n is a, c, g, or t
  misc_feature (1174)..(1174): n is a, c, g, or t
  misc_feature (1177)..(1178): n is a, c, g, or t
  misc_feature (1183)..(1183): n is a, c, g, or t
  misc_feature (1188)..(1188): n is a, c, g, or t
  misc_feature (1197)..(1197): n is a, c, g, or t
  misc_feature (1199)..(1199): n is a, c, g, or t
  misc_feature (1203)..(1203): n is a, c, g, or t
  misc_feature (1208)..(1209): n is a, c, g, or t
  misc_feature (1212)..(1213): n is a, c, g, or t
  misc_feature (1222)..(1222): n is a, c, g, or t
  misc_feature (1228)..(1228): n is a, c, g, or t
  misc_feature (1235)..(1235): n is a, c, g, or t
  misc_feature (1242)..(1242): n is a, c, g, or t
  misc_feature (1245)..(1245): n is a, c, g, or t
  misc_feature (1247)..(1248): n is a, c, g, or t
  misc_feature (1257)..(1257): n is a, c, g, or t
  misc_feature (1277)..(1277): n is a, c, g, or t
  misc_feature (1281)..(1281): n is a, c, g, or t
  misc_feature (1292)..(1292): n is a, c, g, or t
  misc_feature (1298)..(1298): n is a, c, g, or t
  misc_feature (1300)..(1300): n is a, c, g, or t
  misc_feature (1302)..(1302): n is a, c, g, or t
  misc_feature (1310)..(1310): n is a, c, g, or t
tagagaaattactatgagaggatcgcatcaccatcaccatcacggatcctatttaggtgacactatagaatcgtcgacccacgcgtccgggaaccacgtggtcaaactcctctgtggcagtctgacccgcctcctggactcagtcagggcgatacaggcagctggcccttgggttcaaggaccagagcaggacctgacccaggaagccctgtttgtttacacccaggtgttctgccatgctctgcacatcatggccatgctccacccggaggtctgtgagccactctacgttttagccttggaaaccctcacctgctatgagactttgagcaagaccaacccttctgtcagctccttgctccagagggcacacgagcagtgcttcttaaagtccattgctgagggcatcggccctgaagaacggcgccaaaccctgttgcagaagatgagcagcttctgacttggcgtggggagctgggccccaacatggcgggtctgcagaagatcagcagcttcttacctgtgcgggagcgaaaaagctgggcttcaacatggcaggtctgtaggggtcagacccgagcagcctggactttacagttatgtgaaactgtccacaaaaagtcatggcaataatggtgtaaagaaaatagtttcttgggtatttgtaacgtacaaactatcataaaaattctcctctttcgcaaaaaaaaaaaaaaaaaaaaaaaaaaaagggcggccgctccctatagtgagtcgtattaagcttaattagctgagcttggactcctgttgatagatccagtaatgacctcanaactccatctggatttgttcaaaacgctcggttgccgccgggcgttttttattggtganantccaagctagcttggcganattttcaggagctaaggagctaaaatggaaaaaaaatccctggatataccaccgttgaatatcccaatggcatcntaaaaanattttgagnatttcantcagttgctcaatgtacntataacnaacngttcactgnaatnacggcnttttaanacgtaaaaaaataacccaantttanccggcnttnttcnattttgccncngaaaagncctccgaattntanggnaaaaaangngaactgggantgnaaagntcccctnttaaccgtttcngaanaaanaannttttnccctnggagaaaancnaaanttcgnnttnnacaaaattncaaaangggggtngggaaanccncnnttccaaggntttaaaaattttttcccccncccnggggattcccntttttnangncaaaaaan

SEQ ID NO: 835 - DNA, 1634 bp, Homo Sapiens
  misc_feature (2)..(2): n is a, c, g, or t
  misc_feature (5)..(6): n is a, c, g, or t
  misc_feature (10)..(10): n is a, c, g, or t
  misc_feature (12)..(12): n is a, c, g, or t
  misc_feature (31)..(31): n is a, c, g, or t
  misc_feature (44)..(44): n is a, c, g, or t
  misc_feature (60)..(60): n is a, c, g, or t
  misc_feature (74)..(74): n is a, c, g, or t
  misc_feature (82)..(82): n is a, c, g, or t
  misc_feature (104)..(104): n is a, c, g, or t
  misc_feature (126)..(126): n is a, c, g, or t
  misc_feature (131)..(131): n is a, c, g, or t
  misc_feature (138)..(138): n is a, c, g, or t
  misc_feature (160)..(160): n is a, c, g, or t
  misc_feature (165)..(165): n is a, c, g, or t
  misc_feature (180)..(180): n is a, c, g, or t
  misc_feature (190)..(190): n is a, c, g, or t
  misc_feature (193)..(194): n is a, c, g, or t
  misc_feature (198)..(198): n is a, c, g, or t
  misc_feature (200)..(200): n is a, c, g, or t
  misc_feature (202)..(202): n is a, c, g, or t
  misc_feature (207)..(207): n is a, c, g, or t
  misc_feature (212)..(212): n is a, c, g, or t
  misc_feature (217)..(217): n is a, c, g, or t
  misc_feature (223)..(223): n is a, c, g, or t
  misc_feature (230)..(230): n is a, c, g, or t
  misc_feature (240)..(240): n is a, c, g, or t
  misc_feature (245)..(245): n is a, c, g, or t
  misc_feature (247)..(247): n is a, c, g, or t
  misc_feature (253)..(253): n is a, c, g, or t
  misc_feature (256)..(257): n is a, c, g, or t
  misc_feature (265)..(265): n is a, c, g, or t
  misc_feature (268)..(268): n is a, c, g, or t
  misc_feature (274)..(274): n is a, c, g, or t
  misc_feature (281)..(281): n is a, c, g, or t
  misc_feature (291)..(291): n is a, c, g, or t
  misc_feature (296)..(296): n is a, c, g, or t
  misc_feature (298)..(299): n is a, c, g, or t
  misc_feature (302)..(302): n is a, c, g, or t
  misc_feature (306)..(306): n is a, c, g, or t
  misc_feature (313)..(313): n is a, c, g, or t
  misc_feature (315)..(315): n is a, c, g, or t
  misc_feature (321)..(321): n is a, c, g, or t
  misc_feature (333)..(334): n is a, c, g, or t
  misc_feature (336)..(336): n is a, c, g, or t
  misc_feature (339)..(339): n is a, c, g, or t
  misc_feature (347)..(347): n is a, c, g, or t
  misc_feature (351)..(351): n is a, c, g, or t
  misc_feature (356)..(358): n is a, c, g, or t
  misc_feature (360)..(360): n is a, c, g, or t
  misc_feature (366)..(366): n is a, c, g, or t
  misc_feature (372)..(373): n is a, c, g, or t
  misc_feature (376)..(376): n is a, c, g, or t
  misc_feature (381)..(381): n is a, c, g, or t
  misc_feature (383)..(383): n is a, c, g, or t
  misc_feature (385)..(385): n is a, c, g, or t
  misc_feature (391)..(391): n is a, c, g, or t
  misc_feature (393)..(394): n is a, c, g, or t
  misc_feature (403)..(403): n is a, c, g, or t
  misc_feature (410)..(410): n is a, c, g, or t
  misc_feature (412)..(412): n is a, c, g, or t
  misc_feature (415)..(415): n is a, c, g, or t
  misc_feature (417)..(418): n is a, c, g, or t
  misc_feature (420)..(420): n is a, c, g, or t
  misc_feature (423)..(423): n is a, c, g, or t
  misc_feature (435)..(435): n is a, c, g, or t
  misc_feature (438)..(438): n is a, c, g, or t
  misc_feature (441)..(441): n is a, c, g, or t
  misc_feature (443)..(443): n is a, c, g, or t
  misc_feature (446)..(447): n is a, c, g, or t
  misc_feature (451)..(451): n is a, c, g, or t
  misc_feature (467)..(467): n is a, c, g, or t
  misc_feature (469)..(471): n is a, c, g, or t
  misc_feature (475)..(475): n is a, c, g, or t
  misc_feature (480)..(482): n is a, c, g, or t
  misc_feature (484)..(485): n is a, c, g, or t
  misc_feature (490)..(491): n is a, c, g, or t
  misc_feature (493)..(493): n is a, c, g, or t
  misc_feature (495)..(495): n is a, c, g, or t
  misc_feature (500)..(500): n is a, c, g, or t
  misc_feature (502)..(503): n is a, c, g, or t
  misc_feature (507)..(507): n is a, c, g, or t
  misc_feature (510)..(512): n is a, c, g, or t
  misc_feature (517)..(518): n is a, c, g, or t
  misc_feature (521)..(521): n is a, c, g, or t
  misc_feature (528)..(528): n is a, c, g, or t
  misc_feature (532)..(532): n is a, c, g, or t
  misc_feature (536)..(539): n is a, c, g, or t
  misc_feature (543)..(544): n is a, c, g, or t
  misc_feature (546)..(549): n is a, c, g, or t
  misc_feature (551)..(552): n is a, c, g, or t
  misc_feature (555)..(555): n is a, c, g, or t
  misc_feature (557)..(557): n is a, c, g, or t
  misc_feature (560)..(562): n is a, c, g, or t
  misc_feature (566)..(566): n is a, c, g, or t
  misc_feature (569)..(572): n is a, c, g, or t
  misc_feature (574)..(577): n is a, c, g, or t
  misc_feature (580)..(580): n is a, c, g, or t
  misc_feature (584)..(584): n is a, c, g, or t
  misc_feature (588)..(589): n is a, c, g, or t
  misc_feature (594)..(594): n is a, c, g, or t
  misc_feature (601)..(603): n is a, c, g, or t
  misc_feature (610)..(612): n is a, c, g, or t
  misc_feature (617)..(617): n is a, c, g, or t
  misc_feature (619)..(619): n is a, c, g, or t
  misc_feature (621)..(621): n is a, c, g, or t
  misc_feature (628)..(628): n is a, c, g, or t
  misc_feature (631)..(631): n is a, c, g, or t
  misc_feature (634)..(634): n is a, c, g, or t
  misc_feature (636)..(636): n is a, c, g, or t
  misc_feature (639)..(640): n is a, c, g, or t
  misc_feature (643)..(644): n is a, c, g, or t
  misc_feature (646)..(646): n is a, c, g, or t
  misc_feature (648)..(648): n is a, c, g, or t
  misc_feature (652)..(652): n is a, c, g, or t
  misc_feature (654)..(654): n is a, c, g, or t
  misc_feature (659)..(659): n is a, c, g, or t
  misc_feature (661)..(661): n is a, c, g, or t
  misc_feature (667)..(667): n is a, c, g, or t
  misc_feature (669)..(669): n is a, c, g, or t
  misc_feature (671)..(671): n is a, c, g, or t
  misc_feature (674)..(675): n is a, c, g, or t
  misc_feature (678)..(678): n is a, c, g, or t
  misc_feature (682)..(682): n is a, c, g, or t
  misc_feature (684)..(685): n is a, c, g, or t
  misc_feature (688)..(688): n is a, c, g, or t
  misc_feature (693)..(694): n is a, c, g, or t
  misc_feature (703)..(704): n is a, c, g, or t
  misc_feature (706)..(706): n is a, c, g, or t
  misc_feature (708)..(709): n is a, c, g, or t
  misc_feature (711)..(711): n is a, c, g, or t
  misc_feature (714)..(714): n is a, c, g, or t
  misc_feature (717)..(717): n is a, c, g, or t
  misc_feature (722)..(722): n is a, c, g, or t
  misc_feature (724)..(725): n is a, c, g, or t
  misc_feature (727)..(727): n is a, c, g, or t
  misc_feature (732)..(732): n is a, c, g, or t
  misc_feature (734)..(735): n is a, c, g, or t
  misc_feature (737)..(737): n is a, c, g, or t
  misc_feature (739)..(740): n is a, c, g, or t
  misc_feature (743)..(743): n is a, c, g, or t
  misc_feature (745)..(745): n is a, c, g, or t
  misc_feature (748)..(749): n is a, c, g, or t
  misc_feature (756)..(756): n is a, c, g, or t
  misc_feature (759)..(760): n is a, c, g, or t
  misc_feature (763)..(763): n is a, c, g, or t
  misc_feature (766)..(766): n is a, c, g, or t
  misc_feature (768)..(769): n is a, c, g, or t
  misc_feature (771)..(771): n is a, c, g, or t
  misc_feature (773)..(775): n is a, c, g, or t
  misc_feature (779)..(779): n is a, c, g, or t
  misc_feature (789)..(790): n is a, c, g, or t
  misc_feature (793)..(793): n is a, c, g, or t
  misc_feature (797)..(797): n is a, c, g, or t
  misc_feature (800)..(800): n is a, c, g, or t
  misc_feature (802)..(802): n is a, c, g, or t
  misc_feature (811)..(811): n is a, c, g, or t
  misc_feature (813)..(815): n is a, c, g, or t
  misc_feature (817)..(817): n is a, c, g, or t
  misc_feature (819)..(821): n is a, c, g, or t
  misc_feature (828)..(828): n is a, c, g, or t
  misc_feature (831)..(831): n is a, c, g, or t
  misc_feature (834)..(834): n is a, c, g, or t
  misc_feature (838)..(838): n is a, c, g, or t
  misc_feature (840)..(840): n is a, c, g, or t
  misc_feature (842)..(842): n is a, c, g, or t
  misc_feature (849)..(849): n is a, c, g, or t
  misc_feature (852)..(854): n is a, c, g, or t
  misc_feature (856)..(856): n is a, c, g, or t
  misc_feature (859)..(860): n is a, c, g, or t
  misc_feature (863)..(863): n is a, c, g, or t
  misc_feature (865)..(867): n is a, c, g, or t
  misc_feature (871)..(871): n is a, c, g, or t
  misc_feature (873)..(873): n is a, c, g, or t
  misc_feature (882)..(883): n is a, c, g, or t
  misc_feature (886)..(889): n is a, c, g, or t
  misc_feature (891)..(891): n is a, c, g, or t
  misc_feature (894)..(896): n is a, c, g, or t
  misc_feature (898)..(898): n is a, c, g, or t
  misc_feature (901)..(903): n is a, c, g, or t
  misc_feature (909)..(909): n is a, c, g, or t
  misc_feature (914)..(914): n is a, c, g, or t
  misc_feature (916)..(916): n is a, c, g, or t
  misc_feature (918)..(920): n is a, c, g, or t
  misc_feature (922)..(924): n is a, c, g, or t
  misc_feature (930)..(930): n is a, c, g, or t
  misc_feature (932)..(933): n is a, c, g, or t
  misc_feature (936)..(937): n is a, c, g, or t
  misc_feature (940)..(941): n is a, c, g, or t
  misc_feature (945)..(947): n is a, c, g, or t
  misc_feature (950)..(950): n is a, c, g, or t
  misc_feature (952)..(952): n is a, c, g, or t
  misc_feature (954)..(955): n is a, c, g, or t
  misc_feature (957)..(958): n is a, c, g, or t
  misc_feature (960)..(961): n is a, c, g, or t
  misc_feature (964)..(964): n is a, c, g, or t
  misc_feature (966)..(966): n is a, c, g, or t
  misc_feature (969)..(969): n is a, c, g, or t
  misc_feature (974)..(974): n is a, c, g, or t
  misc_feature (976)..(976): n is a, c, g, or t
  misc_feature (978)..(978): n is a, c, g, or t
  misc_feature (982)..(982): n is a, c, g, or t
  misc_feature (984)..(985): n is a, c, g, or t
  misc_feature (996)..(996): n is a, c, g, or t
  misc_feature (998)..(999): n is a, c, g, or t
  misc_feature (1001)..(1001): n is a, c, g, or t
  misc_feature (1003)..(1004): n is a, c, g, or t
  misc_feature (1008)..(1009): n is a, c, g, or t
  misc_feature (1014)..(1014): n is a, c, g, or t
  misc_feature (1017)..(1020): n is a, c, g, or t
  misc_feature (1022)..(1023): n is a, c, g, or t
  misc_feature (1025)..(1025): n is a, c, g, or t
  misc_feature (1027)..(1028): n is a, c, g, or t
  misc_feature (1034)..(1035): n is a, c, g, or t
  misc_feature (1041)..(1042): n is a, c, g, or t
  misc_feature (1046)..(1046): n is a, c, g, or t
  misc_feature (1050)..(1050): n is a, c, g, or t
  misc_feature (1053)..(1053): n is a, c, g, or t
  misc_feature (1056)..(1058): n is a, c, g, or t
  misc_feature (1065)..(1065): n is a, c, g, or t
  misc_feature (1068)..(1068): n is a, c, g, or t
  misc_feature (1072)..(1073): n is a, c, g, or t
  misc_feature (1076)..(1076): n is a, c, g, or t
  misc_feature (1078)..(1080): n is a, c, g, or t
  misc_feature (1082)..(1083): n is a, c, g, or t
  misc_feature (1085)..(1085): n is a, c, g, or t
  misc_feature (1087)..(1089): n is a, c, g, or t
  misc_feature (1092)..(1094): n is a, c, g, or t
  misc_feature (1097)..(1097): n is a, c, g, or t
  misc_feature (1099)..(1099): n is a, c, g, or t
  misc_feature (1101)..(1101): n is a, c, g, or t
  misc_feature (1104)..(1106): n is a, c, g, or t
  misc_feature (1111)..(1111): n is a, c, g, or t
  misc_feature (1120)..(1120): n is a, c, g, or t
  misc_feature (1122)..(1122): n is a, c, g, or t
  misc_feature (1124)..(1128): n is a, c, g, or t
  misc_feature (1135)..(1137): n is a, c, g, or t
  misc_feature (1139)..(1140): n is a, c, g, or t
  misc_feature (1146)..(1147): n is a, c, g, or t
  misc_feature (1152)..(1157): n is a, c, g, or t
  misc_feature (1162)..(1164): n is a, c, g, or t
  misc_feature (1168)..(1168): n is a, c, g, or t
  misc_feature (1172)..(1174): n is a, c, g, or t
  misc_feature (1178)..(1178): n is a, c, g, or t
  misc_feature (1184)..(1184): n is a, c, g, or t
  misc_feature (1189)..(1189): n is a, c, g, or t
  misc_feature (1194)..(1194): n is a, c, g, or t
  misc_feature (1202)..(1202): n is a, c, g, or t
  misc_feature (1207)..(1207): n is a, c, g, or t
  misc_feature (1211)..(1211): n is a, c, g, or t
  misc_feature (1223)..(1223): n is a, c, g, or t
  misc_feature (1225)..(1226): n is a, c, g, or t
  misc_feature (1228)..(1229): n is a, c, g, or t
  misc_feature (1235)..(1235): n is a, c, g, or t
  misc_feature (1240)..(1240): n is a, c, g, or t
  misc_feature (1242)..(1242): n is a, c, g, or t
  misc_feature (1245)..(1245): n is a, c, g, or t
  misc_feature (1247)..(1247): n is a, c, g, or t
  misc_feature (1253)..(1253): n is a, c, g, or t
  misc_feature (1260)..(1260): n is a, c, g, or t
  misc_feature (1263)..(1264): n is a, c, g, or t
  misc_feature (1267)..(1272): n is a, c, g, or t
  misc_feature (1276)..(1278): n is a, c, g, or t
  misc_feature (1281)..(1281): n is a, c, g, or t
  misc_feature (1286)..(1286): n is a, c, g, or t
  misc_feature (1288)..(1288): n is a, c, g, or t
  misc_feature (1290)..(1290): n is a, c, g, or t
  misc_feature (1295)..(1295): n is a, c, g, or t
  misc_feature (1298)..(1300): n is a, c, g, or t
  misc_feature (1303)..(1305): n is a, c, g, or t
  misc_feature (1310)..(1312): n is a, c, g, or t
  misc_feature (1314)..(1314): n is a, c, g, or t
  misc_feature (1316)..(1320): n is a, c, g, or t
  misc_feature (1324)..(1326): n is a, c, g, or t
  misc_feature (1330)..(1330): n is a, c, g, or t
  misc_feature (1333)..(1334): n is a, c, g, or t
  misc_feature (1340)..(1340): n is a, c, g, or t
  misc_feature (1342)..(1342): n is a, c, g, or t
  misc_feature (1347)..(1347): n is a, c, g, or t
  misc_feature (1349)..(1350): n is a, c, g, or t
  misc_feature (1352)..(1353): n is a, c, g, or t
  misc_feature (1356)..(1356): n is a, c, g, or t
  misc_feature (1358)..(1359): n is a, c, g, or t
  misc_feature (1362)..(1363): n is a, c, g, or t
  misc_feature (1365)..(1365): n is a, c, g, or t
  misc_feature (1367)..(1367): n is a, c, g, or t
  misc_feature (1370)..(1372): n is a, c, g, or t
  misc_feature (1376)..(1376): n is a, c, g, or t
  misc_feature (1378)..(1378): n is a, c, g, or t
  misc_feature (1381)..(1382): n is a, c, g, or t
  misc_feature (1386)..(1386): n is a, c, g, or t
  misc_feature (1391)..(1391): n is a, c, g, or t
  misc_feature (1393)..(1394): n is a, c, g, or t
  misc_feature (1396)..(1398): n is a, c, g, or t
  misc_feature (1400)..(1401): n is a, c, g, or t
  misc_feature (1405)..(1405): n is a, c, g, or t
  misc_feature (1407)..(1407): n is a, c, g, or t
  misc_feature (1410)..(1415): n is a, c, g, or t
  misc_feature (1418)..(1418): n is a, c, g, or t
  misc_feature (1422)..(1422): n is a, c, g, or t
  misc_feature (1429)..(1430): n is a, c, g, or t
  misc_feature (1435)..(1435): n is a, c, g, or t
  misc_feature (1439)..(1439): n is a, c, g, or t
  misc_feature (1445)..(1445): n is a, c, g, or t
  misc_feature (1447)..(1448): n is a, c, g, or t
  misc_feature (1451)..(1451): n is a, c, g, or t
  misc_feature (1454)..(1454): n is a, c, g, or t
  misc_feature (1456)..(1456): n is a, c, g, or t
  misc_feature (1462)..(1464): n is a, c, g, or t
  misc_feature (1469)..(1469): n is a, c, g, or t
  misc_feature (1472)..(1473): n is a, c, g, or t
  misc_feature (1476)..(1476): n is a, c, g, or t
  misc_feature (1480)..(1485): n is a, c, g, or t
  misc_feature (1489)..(1491): n is a, c, g, or t
  misc_feature (1493)..(1494): n is a, c, g, or t
  misc_feature (1496)..(1496): n is a, c, g, or t
  misc_feature (1498)..(1498): n is a, c, g, or t
  misc_feature (1500)..(1500): n is a, c, g, or t
  misc_feature (1503)..(1504): n is a, c, g, or t
  misc_feature (1507)..(1508): n is a, c, g, or t
  misc_feature (1515)..(1520): n is a, c, g, or t
  misc_feature (1524)..(1524): n is a, c, g, or t
  misc_feature (1528)..(1531): n is a, c, g, or t
  misc_feature (1537)..(1537): n is a, c, g, or t
  misc_feature (1540)..(1540): n is a, c, g, or t
  misc_feature (1550)..(1550): n is a, c, g, or t
  misc_feature (1554)..(1554): n is a, c, g, or t
  misc_feature (1559)..(1560): n is a, c, g, or t
  misc_feature (1564)..(1565): n is a, c, g, or t
  misc_feature (1568)..(1568): n is a, c, g, or t
  misc_feature (1572)..(1572): n is a, c, g, or t
  misc_feature (1576)..(1576): n is a, c, g, or t
  misc_feature (1579)..(1579): n is a, c, g, or t
  misc_feature (1582)..(1582): n is a, c, g, or t
  misc_feature (1599)..(1599): n is a, c, g, or t
  misc_feature (1601)..(1601): n is a, c, g, or t
  misc_feature (1603)..(1604): n is a, c, g, or t
  misc_feature (1608)..(1609): n is a, c, g, or t
  misc_feature (1611)..(1611): n is a, c, g, or t
  misc_feature (1613)..(1613): n is a, c, g, or t
  misc_feature (1618)..(1619): n is a, c, g, or t
  misc_feature (1621)..(1622): n is a, c, g, or t
  misc_feature (1624)..(1624): n is a, c, g, or t
  misc_feature (1626)..(1626): n is a, c, g, or t
anatnngggnanattacttggagggatcgcntcacctctcaccntcacggatcctatttnggtgacacatatanaatcgtcnacccacgcgctccgcccacgangatctggcctgaaaggcggtangtccngctcctntcatcctgggaggatgtgcggncccgncatggaccatggccntcgcctgatntcnncctncnantacancgtcnactanggtcgnaggtgtnctcgaaactncctgnanaagtangannactgccanccntccccnctgttgnctggcaagcnggaanannaangacnagaaggntntgatcntcatcaaggttnngntgnaggcgccncaanatccnnnanaatgancttgtnntgnggtgngncnagcacngnnaggaatgangagtccnancananncnggnccatgtcggacnctntcngnganntgangctcaagcggtccgcncnnnaatnctcannnannctagnngngnctatngnnaaanacnnnagttnntangaaatgncacntagnnnntgcnncnnnngnnctngnctnnntctncannnntnnnnatnttantagnntgtcnacatgcnnncacttcnnnaatgntngnaaaaatnttngcnanatnnaannancntgcnantatcncngctagntntnccnnatnaaancnnttnctcgnncctgggttnngntnntntanccncctantnncnatatngnntntnntgnanacnnggagaangcnntgntcnanngntnnnatanaaatagtttnnctnagcntcnancaatggtcncnnntnannnaactcanatnaantaanantngaattanttnnnanctnnctnannncggnanctttttttnnaannnnantcnnnanaannntaattntctgnantnnntnnnatattngnnctnntannaacnnntcncntnntnngnnccnantanattcnantnaaantnngtccatcagtncnncncnnaccnntctanctnnnncnnantnntttccnnacgtanntccnctanctnctnnnatgccgntgnatgnnaancnnngnntntnnntannnatngncntcnnncccanacgcgcacnantnnnnnaatattnnnanntctacnnctctnnnnnntattnnntgcnattnnntctnatcaancgaantcaancaactttnaatcnctcncggaagacatantnntnncaaatngaatnanttntnttcatngtctctnganncannnnnncatnnncgncaganantntgctntannnaannntttannntncnnnnnttannnatancannagcaancnataantnnanntangnnacnntncnctnnngtantnttnnattnattcntnncnnnannctantntcnnnnnntantttntctgcanntccantatntttctnannacntgnangtatcnnnttacnccnnatnatannnnnnttcnnntnntnangntcnncanntacactnnnnnngtcngtcnnnnccactnatntactttagantatncacannatannacngaanattnagntgnacaaattctaggcaatntnannaacnnananaggtnntnncnanggtcgcag

SEQ ID NO: 836 - DNA, 1543 bp, Homo Sapiens
  misc_feature (2)..(3): n is a, c, g, or t
  misc_feature (8)..(9): n is a, c, g, or t
  misc_feature (14)..(14): n is a, c, g, or t
  misc_feature (17)..(17): n is a, c, g, or t
  misc_feature (19)..(19): n is a, c, g, or t
  misc_feature (22)..(23): n is a, c, g, or t
  misc_feature (26)..(28): n is a, c, g, or t
  misc_feature (32)..(32): n is a, c, g, or t
  misc_feature (35)..(35): n is a, c, g, or t
  misc_feature (41)..(41): n is a, c, g, or t
  misc_feature (45)..(45): n is a, c, g, or t
  misc_feature (48)..(48): n is a, c, g, or t
  misc_feature (54)..(54): n is a, c, g, or t
  misc_feature (61)..(61): n is a, c, g, or t
  misc_feature (66)..(67): n is a, c, g, or t
  misc_feature (99)..(99): n is a, c, g, or t
  misc_feature (102)..(102): n is a, c, g, or t
  misc_feature (112)..(112): n is a, c, g, or t
  misc_feature (117)..(117): n is a, c, g, or t
  misc_feature (120)..(120): n is a, c, g, or t
  misc_feature (135)..(135): n is a, c, g, or t
  misc_feature (142)..(142): n is a, c, g, or t
  misc_feature (146)..(146): n is a, c, g, or t
  misc_feature (161)..(161): n is a, c, g, or t
  misc_feature (164)..(164): n is a, c, g, or t
  misc_feature (166)..(166): n is a, c, g, or t
  misc_feature (177)..(177): n is a, c, g, or t
  misc_feature (183)..(184): n is a, c, g, or t
  misc_feature (186)..(186): n is a, c, g, or t
  misc_feature (188)..(188): n is a, c, g, or t
  misc_feature (198)..(198): n is a, c, g, or t
  misc_feature (207)..(207): n is a, c, g, or t
  misc_feature (213)..(213): n is a, c, g, or t
  misc_feature (218)..(219): n is a, c, g, or t
  misc_feature (227)..(227): n is a, c, g, or t
  misc_feature (236)..(236): n is a, c, g, or t
  misc_feature (239)..(239): n is a, c, g, or t
  misc_feature (242)..(243): n is a, c, g, or t
  misc_feature (246)..(246): n is a, c, g, or t
  misc_feature (251)..(251): n is a, c, g, or t
  misc_feature (254)..(254): n is a, c, g, or t
  misc_feature (256)..(256): n is a, c, g, or t
  misc_feature (262)..(262): n is a, c, g, or t
  misc_feature (268)..(268): n is a, c, g, or t
  misc_feature (272)..(272): n is a, c, g, or t
  misc_feature (280)..(280): n is a, c, g, or t
  misc_feature (282)..(282): n is a, c, g, or t
  misc_feature (292)..(292): n is a, c, g, or t
  misc_feature (296)..(296): n is a, c, g, or t
  misc_feature (298)..(298): n is a, c, g, or t
  misc_feature (305)..(305): n is a, c, g, or t
  misc_feature (308)..(308): n is a, c, g, or t
  misc_feature (310)..(312): n is a, c, g, or t
  misc_feature (318)..(318): n is a, c, g, or t
  misc_feature (325)..(325): n is a, c, g, or t
  misc_feature (327)..(328): n is a, c, g, or t
  misc_feature (341)..(341): n is a, c, g, or t
  misc_feature (344)..(344): n is a, c, g, or t
  misc_feature (346)..(347): n is a, c, g, or t
  misc_feature (349)..(349): n is a, c, g, or t
  misc_feature (352)..(352): n is a, c, g, or t
  misc_feature (359)..(359): n is a, c, g, or t
  misc_feature (363)..(363): n is a, c, g, or t
  misc_feature (380)..(383): n is a, c, g, or t
  misc_feature (391)..(391): n is a, c, g, or t
  misc_feature (405)..(406): n is a, c, g, or t
  misc_feature (414)..(414): n is a, c, g, or t
  misc_feature (416)..(416): n is a, c, g, or t
  misc_feature (418)..(418): n is a, c, g, or t
  misc_feature (421)..(421): n is a, c, g, or t
  misc_feature (428)..(428): n is a, c, g, or t
  misc_feature (430)..(430): n is a, c, g, or t
  misc_feature (436)..(436): n is a, c, g, or t
  misc_feature (442)..(443): n is a, c, g, or t
  misc_feature (446)..(447): n is a, c, g, or t
  misc_feature (453)..(453): n is a, c, g, or t
  misc_feature (459)..(459): n is a, c, g, or t
  misc_feature (461)..(461): n is a, c, g, or t
  misc_feature (476)..(476): n is a, c, g, or t
  misc_feature (485)..(485): n is a, c, g, or t
  misc_feature (507)..(508): n is a, c, g, or t
  misc_feature (519)..(519): n is a, c, g, or t
  misc_feature (527)..(527): n is a, c, g, or t
  misc_feature (531)..(531): n is a, c, g, or t
  misc_feature (536)..(536): n is a, c, g, or t
  misc_feature (538)..(538): n is a, c, g, or t
  misc_feature (542)..(542): n is a, c, g, or t
  misc_feature (545)..(546): n is a, c, g, or t
  misc_feature (551)..(552): n is a, c, g, or t
  misc_feature (554)..(554): n is a, c, g, or t
  misc_feature (559)..(560): n is a, c, g, or t
  misc_feature (563)..(563): n is a, c, g, or t
  misc_feature (566)..(566): n is a, c, g, or t
  misc_feature (569)..(570): n is a, c, g, or t
  misc_feature (574)..(574): n is a, c, g, or t
  misc_feature (583)..(583): n is a, c, g, or t
  misc_feature (591)..(591): n is a, c, g, or t
  misc_feature (593)..(594): n is a, c, g, or t
  misc_feature (596)..(596): n is a, c, g, or t
  misc_feature (601)..(601): n is a, c, g, or t
  misc_feature (603)..(604): n is a, c, g, or t
  misc_feature (614)..(614): n is a, c, g, or t
  misc_feature (618)..(618): n is a, c, g, or t
  misc_feature (621)..(622): n is a, c, g, or t
  misc_feature (624)..(624): n is a, c, g, or t
  misc_feature (629)..(629): n is a, c, g, or t
  misc_feature (636)..(636): n is a, c, g, or t
  misc_feature (648)..(648): n is a, c, g, or t
  misc_feature (652)..(652): n is a, c, g, or t
  misc_feature (661)..(661): n is a, c, g, or t
  misc_feature (664)..(664): n is a, c, g, or t
  misc_feature (666)..(666): n is a, c, g, or t
  misc_feature (668)..(668): n is a, c, g, or t
  misc_feature (671)..(671): n is a, c, g, or t
  misc_feature (676)..(676): n is a, c, g, or t
  misc_feature (679)..(679): n is a, c, g, or t
  misc_feature (681)..(681): n is a, c, g, or t
  misc_feature (683)..(683): n is a, c, g, or t
  misc_feature (688)..(689): n is a, c, g, or t
  misc_feature (691)..(691): n is a, c, g, or t
  misc_feature (693)..(693): n is a, c, g, or t
  misc_feature (698)..(698): n is a, c, g, or t
  misc_feature (705)..(707): n is a, c, g, or t
  misc_feature (709)..(709): n is a, c, g, or t
  misc_feature (718)..(718): n is a, c, g, or t
  misc_feature (723)..(723): n is a, c, g, or t
  misc_feature (733)..(733): n is a, c, g, or t
  misc_feature (739)..(739): n is a, c, g, or t
  misc_feature (745)..(745): n is a, c, g, or t
  misc_feature (748)..(748): n is a, c, g, or t
  misc_feature (750)..(750): n is a, c, g, or t
  misc_feature (752)..(752): n is a, c, g, or t
  misc_feature (757)..(760): n is a, c, g, or t
  misc_feature (763)..(763): n is a, c, g, or t
  misc_feature (772)..(772): n is a, c, g, or t
  misc_feature (781)..(781): n is a, c, g, or t
  misc_feature (783)..(785): n is a, c, g, or t
  misc_feature (790)..(790): n is a, c, g, or t
  misc_feature (797)..(797): n is a, c, g, or t
  misc_feature (803)..(803): n is a, c, g, or t
  misc_feature (807)..(807): n is a, c, g, or t
  misc_feature (811)..(811): n is a, c, g, or t
  misc_feature (816)..(816): n is a, c, g, or t
  misc_feature (818)..(819): n is a, c, g, or t
  misc_feature (822)..(823): n is a, c, g, or t
  misc_feature (826)..(826): n is a, c, g, or t
  misc_feature (828)..(828): n is a, c, g, or t
  misc_feature (836)..(836): n is a, c, g, or t
  misc_feature (838)..(838): n is a, c, g, or t
  misc_feature (843)..(845): n is a, c, g, or t
  misc_feature (848)..(848): n is a, c, g, or t
  misc_feature (850)..(850): n is a, c, g, or t
  misc_feature (860)..(860): n is a, c, g, or t
  misc_feature (874)..(874): n is a, c, g, or t
  misc_feature (876)..(876): n is a, c, g, or t
  misc_feature (878)..(878): n is a, c, g, or t
  misc_feature (882)..(882): n is a, c, g, or t
  misc_feature (887)..(889): n is a, c, g, or t
  misc_feature (894)..(894): n is a, c, g, or t
  misc_feature (897)..(897): n is a, c, g, or t
  misc_feature (902)..(902): n is a, c, g, or t
  misc_feature (906)..(906): n is a, c, g, or t
  misc_feature (910)..(910): n is a, c, g, or t
  misc_feature (913)..(913): n is a, c, g, or t
  misc_feature (917)..(918): n is a, c, g, or t
  misc_feature (923)..(923): n is a, c, g, or t
  misc_feature (925)..(927): n is a, c, g, or t
  misc_feature (937)..(938): n is a, c, g, or t
  misc_feature (940)..(940): n is a, c, g, or t
  misc_feature (942)..(942): n is a, c, g, or t
  misc_feature (944)..(944): n is a, c, g, or t
  misc_feature (946)..(947): n is a, c, g, or t
  misc_feature (953)..(954): n is a, c, g, or t
  misc_feature (956)..(956): n is a, c, g, or t
  misc_feature (972)..(972): n is a, c, g, or t
  misc_feature (974)..(975): n is a, c, g, or t
  misc_feature (978)..(978): n is a, c, g, or t
  misc_feature (980)..(981): n is a, c, g, or t
  misc_feature (987)..(987): n is a, c, g, or t
  misc_feature (989)..(990): n is a, c, g, or t
  misc_feature (995)..(995): n is a, c, g, or t
  misc_feature (997)..(998): n is a, c, g, or t
  misc_feature (1005)..(1005): n is a, c, g, or t
  misc_feature (1007)..(1007): n is a, c, g, or t
  misc_feature (1014)..(1014): n is a, c, g, or t
  misc_feature (1018)..(1018): n is a, c, g, or t
  misc_feature (1020)..(1021): n is a, c, g, or t
  misc_feature (1024)..(1024): n is a, c, g, or t
  misc_feature (1027)..(1027): n is a, c, g, or t
  misc_feature (1029)..(1029): n is a, c, g, or t
  misc_feature (1040)..(1040): n is a, c, g, or t
  misc_feature (1045)..(1046): n is a, c, g, or t
  misc_feature (1048)..(1048): n is a, c, g, or t
  misc_feature (1053)..(1053): n is a, c, g, or t
  misc_feature (1060)..(1060): n is a, c, g, or t
  misc_feature (1062)..(1063): n is a, c, g, or t
  misc_feature (1065)..(1065): n is a, c, g, or t
  misc_feature (1068)..(1068): n is a, c, g, or t
  misc_feature (1073)..(1073): n is a, c, g, or t
  misc_feature (1075)..(1075): n is a, c, g, or t
  misc_feature (1079)..(1079): n is a, c, g, or t
  misc_feature (1084)..(1085): n is a, c, g, or t
  misc_feature (1089)..(1089): n is a, c, g, or t
  misc_feature (1092)..(1094): n is a, c, g, or t
  misc_feature (1099)..(1099): n is a, c, g, or t
  misc_feature (1104)..(1105): n is a, c, g, or t
  misc_feature (1108)..(1109): n is a, c, g, or t
  misc_feature (1112)..(1112): n is a, c, g, or t
  misc_feature (1120)..(1120): n is a, c, g, or t
  misc_feature (1129)..(1129): n is a, c, g, or t
  misc_feature (1131)..(1131): n is a, c, g, or t
  misc_feature (1134)..(1134): n is a, c, g, or t
  misc_feature (1137)..(1137): n is a, c, g, or t
  misc_feature (1141)..(1142): n is a, c, g, or t
  misc_feature (1144)..(1144): n is a, c, g, or t
  misc_feature (1146)..(1147): n is a, c, g, or t
  misc_feature (1149)..(1149): n is a, c, g, or t
  misc_feature (1153)..(1153): n is a, c, g, or t
  misc_feature (1155)..(1155): n is a, c, g, or t
  misc_feature (1157)..(1157): n is a, c, g, or t
  misc_feature (1160)..(1160): n is a, c, g, or t
  misc_feature (1164)..(1164): n is a, c, g, or t
  misc_feature (1168)..(1170): n is a, c, g, or t
  misc_feature (1173)..(1173): n is a, c, g, or t
  misc_feature (1175)..(1175): n is a, c, g, or t
  misc_feature (1177)..(1177): n is a, c, g, or t
  misc_feature (1188)..(1189): n is a, c, g, or t
  misc_feature (1194)..(1195): n is a, c, g, or t
  misc_feature (1198)..(1198): n is a, c, g, or t
  misc_feature (1200)..(1201): n is a, c, g, or t
  misc_feature (1206)..(1206): n is a, c, g, or t
  misc_feature (1208)..(1209): n is a, c, g, or t
  misc_feature (1211)..(1211): n is a, c, g, or t
  misc_feature (1213)..(1213): n is a, c, g, or t
  misc_feature (1215)..(1215): n is a, c, g, or t
  misc_feature (1218)..(1218): n is a, c, g, or t
  misc_feature (1227)..(1229): n is a, c, g, or t
  misc_feature (1232)..(1232): n is a, c, g, or t
  misc_feature (1234)..(1234): n is a, c, g, or t
  misc_feature (1237)..(1237): n is a, c, g, or t
  misc_feature (1244)..(1244): n is a, c, g, or t
  misc_feature (1247)..(1247): n is a, c, g, or t
  misc_feature (1249)..(1252): n is a, c, g, or t
  misc_feature (1255)..(1256): n is a, c, g, or t
  misc_feature (1258)..(1258): n is a, c, g, or t
  misc_feature (1260)..(1260): n is a, c, g, or t
  misc_feature (1266)..(1266): n is a, c, g, or t
  misc_feature (1268)..(1269): n is a, c, g, or t
  misc_feature (1276)..(1276): n is a, c, g, or t
  misc_feature (1282)..(1283): n is a, c, g, or t
  misc_feature (1288)..(1288): n is a, c, g, or t
  misc_feature (1292)..(1294): n is a, c, g, or t
  misc_feature (1296)..(1297): n is a, c, g, or t
  misc_feature (1300)..(1300): n is a, c, g, or t
  misc_feature (1302)..(1303): n is a, c, g, or t
  misc_feature (1305)..(1305): n is a, c, g, or t
  misc_feature (1308)..(1309): n is a, c, g, or t
  misc_feature (1327)..(1328): n is a, c, g, or t
  misc_feature (1334)..(1334): n is a, c, g, or t
  misc_feature (1336)..(1337): n is a, c, g, or t
  misc_feature (1340)..(1340): n is a, c, g, or t
  misc_feature (1344)..(1345): n is a, c, g, or t
  misc_feature (1349)..(1349): n is a, c, g, or t
  misc_feature (1351)..(1351): n is a, c, g, or t
  misc_feature (1355)..(1355): n is a, c, g, or t
  misc_feature (1357)..(1357): n is a, c, g, or t
  misc_feature (1363)..(1363): n is a, c, g, or t
  misc_feature (1366)..(1366): n is a, c, g, or t
  misc_feature (1370)..(1370): n is a, c, g, or t
  misc_feature (1372)..(1373): n is a, c, g, or t
  misc_feature (1378)..(1382): n is a, c, g, or t
  misc_feature (1384)..(1384): n is a, c, g, or t
  misc_feature (1387)..(1388): n is a, c, g, or t
  misc_feature (1390)..(1391): n is a, c, g, or t
  misc_feature (1393)..(1393): n is a, c, g, or t
  misc_feature (1405)..(1405): n is a, c, g, or t
  misc_feature (1409)..(1409): n is a, c, g, or t
  misc_feature (1414)..(1415): n is a, c, g, or t
  misc_feature (1417)..(1417): n is a, c, g, or t
  misc_feature (1420)..(1422): n is a, c, g, or t
  misc_feature (1427)..(1427): n is a, c, g, or t
  misc_feature (1429)..(1429): n is a, c, g, or t
  misc_feature (1432)..(1432): n is a, c, g, or t
  misc_feature (1436)..(1436): n is a, c, g, or t
  misc_feature (1438)..(1438): n is a, c, g, or t
  misc_feature (1442)..(1443): n is a, c, g, or t
  misc_feature (1448)..(1448): n is a, c, g, or t
  misc_feature (1450)..(1450): n is a, c, g, or t
  misc_feature (1453)..(1454): n is a, c, g, or t
  misc_feature (1456)..(1456): n is a, c, g, or t
  misc_feature (1459)..(1459): n is a, c, g, or t
  misc_feature (1464)..(1465): n is a, c, g, or t
  misc_feature (1472)..(1473): n is a, c, g, or t
  misc_feature (1475)..(1475): n is a, c, g, or t
  misc_feature (1480)..(1480): n is a, c, g, or t
  misc_feature (1487)..(1487): n is a, c, g, or t
  misc_feature (1504)..(1504): n is a, c, g, or t
  misc_feature (1520)..(1520): n is a, c, g, or t
  misc_feature (1527)..(1527): n is a, c, g, or t
  misc_feature (1531)..(1531): n is a, c, g, or t
  misc_feature (1540)..(1540): n is a, c, g, or t
  misc_feature (1542)..(1542): n is a, c, g, or t
anntaaannaaaanganantannttnnntggnatngggtanaggntcnccctcnaccctgnggcgnntatttatattttggtgtgaacatatataaatntancccacacccnccgcnctngcccacgtagctccncaaaagnaccnaatggcgcatgacanccngngcacttggggncgaccnngngncctggtgganctgggatgnggaacngcggnngcttccgnggatgtttngcnagnngcntccgnggncngggccnagggcngtgnatgggacngnggccaaggcngcgnanctgcatnagncnnngcctangatactnannggatgcccatacnctngnngngcnggattgntcanggacatgaccatctagnnnntgccaganatctatctcttcannctgcctantnangantccgacntnattgantcctanntgnngaactntctcangntatgaagatttgaanattatgccngatgaagaaccagacacgtgcnngaccagctcancaagttcntgtnatttntngatntcnngaacnntnatgcnnatnatnttnnatgnagcgttaantgttcccngnngntgttnannggcattctcntggngtnntnaaccntggaacngaccatctcttngcanttccccccngangnanaancaacntgntncnaaatnngnanctaancaagcannncnccgcctganctatngctaagtgtngaatanggcccntgncncntctgnnnntgntgataaccncttaccccntnnnccatnggatttnctggtnttgntctnggcananntgnngcncnaaccaacncngtatnnngtntntccttggaantcccatgcacttgntnantccnttaannntgganccntgcanctgnccanccngttnnaaatntnnnccaaaggctnncntncngnnggcccnntncataaataatttcacngnnatntnnactccncnnacatncnntaaaggncnattgtanttcntnnaanatntnccttaccaaanaaatnnantcganaaaattncnnanaanatccntnaatnaaaanntttnttnnnaaaanaaatnnagnntcnatctttcngctttttangnttnagntttnnancnnancaancntnaantccncctnnnatntntntgaaaaaaacnngtacnnaancnncccancnnancntnttnataataatnnnttntnaanacaaaanccncnnnnttnnangntcaaangnncatttgntagacnnttttntcannntnnatnanntnaannataaaaagaaactctctnnttgacncnntancatnnacananttgntnagatancanttcngnnaatannnnnantcnncnntncttataaagaangaantcttnntnaannnctttnangantctntnattnnccaantntanntnatntcttnnttaatannanctccncactctnatataatattaaatctnctatatagctcatttnctctacncatncacgaaatnana

SEQ ID NO: 837 - DNA, 1384 bp, Homo Sapiens
  misc_feature (893)..(893): n is a, c, g, or t
  misc_feature (942)..(942): n is a, c, g, or t
  misc_feature (996)..(996): n is a, c, g, or t
  misc_feature (1024)..(1024): n is a, c, g, or t
  misc_feature (1027)..(1028): n is a, c, g, or t
  misc_feature (1037)..(1037): n is a, c, g, or t
  misc_feature (1040)..(1040): n is a, c, g, or t
  misc_feature (1043)..(1044): n is a, c, g, or t
  misc_feature (1059)..(1059): n is a, c, g, or t
  misc_feature (1066)..(1066): n is a, c, g, or t
  misc_feature (1085)..(1085): n is a, c, g, or t
  misc_feature (1095)..(1095): n is a, c, g, or t
  misc_feature (1100)..(1100): n is a, c, g, or t
  misc_feature (1107)..(1107): n is a, c, g, or t
  misc_feature (1110)..(1110): n is a, c, g, or t
  misc_feature (1113)..(1116): n is a, c, g, or t
  misc_feature (1118)..(1169): n is a, c, g, or t
  misc_feature (1174)..(1174): n is a, c, g, or t
  misc_feature (1176)..(1176): n is a, c, g, or t
  misc_feature (1179)..(1179): n is a, c, g, or t
  misc_feature (1203)..(1203): n is a, c, g, or t
  misc_feature (1209)..(1209): n is a, c, g, or t
  misc_feature (1213)..(1213): n is a, c, g, or t
  misc_feature (1219)..(1219): n is a, c, g, or t
  misc_feature (1225)..(1225): n is a, c, g, or t
  misc_feature (1227)..(1227): n is a, c, g, or t
  misc_feature (1235)..(1235): n is a, c, g, or t
  misc_feature (1237)..(1237): n is a, c, g, or t
  misc_feature (1246)..(1246): n is a, c, g, or t
  misc_feature (1248)..(1249): n is a, c, g, or t
  misc_feature (1262)..(1262): n is a, c, g, or t
  misc_feature (1293)..(1293): n is a, c, g, or t
  misc_feature (1297)..(1297): n is a, c, g, or t
  misc_feature (1314)..(1315): n is a, c, g, or t
  misc_feature (1319)..(1321): n is a, c, g, or t
  misc_feature (1323)..(1323): n is a, c, g, or t
  misc_feature (1326)..(1326): n is a, c, g, or t
  misc_feature (1339)..(1340): n is a, c, g, or t
  misc_feature (1345)..(1345): n is a, c, g, or t
  misc_feature (1350)..(1351): n is a, c, g, or t
  misc_feature (1354)..(1354): n is a, c, g, or t
  misc_feature (1359)..(1359): n is a, c, g, or t
  misc_feature (1363)..(1363): n is a, c, g, or t
  misc_feature (1367)..(1367): n is a, c, g, or t
  misc_feature (1375)..(1375): n is a, c, g, or t
  misc_feature (1379)..(1379): n is a, c, g, or t
agagagattactatgagaggatcgcatcaccatcaccatcacggatcctatttaggtgacactatagaatcgtcgacccacgcgtccggtggacttggcggcagaggcagtgcggatccggcgttctccactgatcttttccaaggctgtacagacatggcggcggcttttcggaaggcggctaagtcccggcagcgggaacacagagagcgaagccagcctggctttcgaaaacatctgggcctgctggagaaaaagaaagattacaaacttcgtgcagatgactaccgtaaaaaacaagaatacctcaaagctcttcggaagaaggctcttgaaaaaaatccagatgaattctactacaaaatgactcgggttaaactccaggatggagtacatattattaaggagactaaggaagaagtaaccccagaacaactaaagctgatgagaactcaggacgtcaaatatatagaaatgaagagggttgcagaagctaagaaaatcgaaagactaaaatcagagctccatctgctggatttccaggggaagcaacagaacaagcatgtgttcttttttgacaccaaaaaggaagttgaacagtttgatgtcgcaactcacctgcaaacagccccggagctagtcgacagagtctttaataggcccaggatagagaccttgcagaaagaaaaagtgaaaggagttaccaatcagactggacttaagcgaatagctaaagaaaggcaaaagcagtataactgcctgacacagcggattgaacgagagaagaaattgttcgttattgctcagaaaattcaaacacgcaaagatcttatggataaaactcagaaagtgaaggtgaaaaaagaacggtgaactccccagctatttataantttcagagtcgtcgaaaacgttgacgtgttatagataagccttgtcatnctgtatcaaaaaatctgttgtcgttttctagtaacttcaaattccattactccnaatggccttggtttttccgggtttgtanccnnaaactaaanttntcnntctgacatttaaggnctttctntggacaaacattaaatccncccccccctnctgtnaaaaaanaanaannnnannnnnnnnnnnnnnnnnnnnnnnnnnnnnnnnnnnnnnnnnnnnnnnnnnnnaaggngngcncccccccaagggggccaaaacctnaattcncganctgggncccggntnaaaacccnanaggcccccnannccccggttttttnaacccctggtgcccccggggttttttttggnaaanccccctttgggaatttnnggcnnngnccnaagggaaaaaccnnggttnccccnntancccgncccnaaanttggggtncccnccccg

SEQ ID NO: 838 - DNA, 1328 bp, Homo Sapiens
  misc_feature (869)..(869): n is a, c, g, or t
  misc_feature (883)..(883): n is a, c, g, or t
  misc_feature (890)..(890): n is a, c, g, or t
  misc_feature (893)..(893): n is a, c, g, or t
  misc_feature (943)..(943): n is a, c, g, or t
  misc_feature (945)..(945): n is a, c, g, or t
  misc_feature (961)..(961): n is a, c, g, or t
  misc_feature (964)..(964): n is a, c, g, or t
  misc_feature (973)..(973): n is a, c, g, or t
  misc_feature (1006)..(1006): n is a, c, g, or t
  misc_feature (1026)..(1027): n is a, c, g, or t
  misc_feature (1038)..(1038): n is a, c, g, or t
  misc_feature (1044)..(1044): n is a, c, g, or t
  misc_feature (1064)..(1064): n is a, c, g, or t
  misc_feature (1066)..(1066): n is a, c, g, or t
  misc_feature (1071)..(1071): n is a, c, g, or t
  misc_feature (1082)..(1082): n is a, c, g, or t
  misc_feature (1091)..(1091): n is a, c, g, or t
  misc_feature (1112)..(1112): n is a, c, g, or t
  misc_feature (1114)..(1114): n is a, c, g, or t
  misc_feature (1125)..(1125): n is a, c, g, or t
  misc_feature (1139)..(1139): n is a, c, g, or t
  misc_feature (1155)..(1155): n is a, c, g, or t
  misc_feature (1163)..(1163): n is a, c, g, or t
  misc_feature (1165)..(1165): n is a, c, g, or t
  misc_feature (1168)..(1168): n is a, c, g, or t
  misc_feature (1184)..(1184): n is a, c, g, or t
  misc_feature (1186)..(1186): n is a, c, g, or t
  misc_feature (1190)..(1191): n is a, c, g, or t
  misc_feature (1194)..(1194): n is a, c, g, or t
  misc_feature (1198)..(1198): n is a, c, g, or t
  misc_feature (1201)..(1201): n is a, c, g, or t
  misc_feature (1204)..(1204): n is a, c, g, or t
  misc_feature (1207)..(1207): n is a, c, g, or t
  misc_feature (1214)..(1215): n is a, c, g, or t
  misc_feature (1220)..(1220): n is a, c, g, or t
  misc_feature (1226)..(1227): n is a, c, g, or t
  misc_feature (1231)..(1231): n is a, c, g, or t
  misc_feature (1238)..(1238): n is a, c, g, or t
  misc_feature (1243)..(1244): n is a, c, g, or t
  misc_feature (1249)..(1249): n is a, c, g, or t
  misc_feature (1251)..(1251): n is a, c, g, or t
  misc_feature (1257)..(1257): n is a, c, g, or t
  misc_feature (1273)..(1274): n is a, c, g, or t
  misc_feature (1279)..(1279): n is a, c, g, or t
  misc_feature (1281)..(1283): n is a, c, g, or t
  misc_feature (1296)..(1296): n is a, c, g, or t
  misc_feature (1300)..(1300): n is a, c, g, or t
  misc_feature (1306)..(1306): n is a, c, g, or t
  misc_feature (1308)..(1308): n is a, c, g, or t
  misc_feature (1310)..(1312): n is a, c, g, or t
  misc_feature (1314)..(1314): n is a, c, g, or t
  misc_feature (1316)..(1316): n is a, c, g, or t
  misc_feature (1320)..(1323): n is a, c, g, or t
  misc_feature (1328)..(1328): n is a, c, g, or t
attagagaaattactatgagaggatcgcatcaccatcaccatcacggatcctatttaggtgacactatagaatcgtcgacccacgcgtccgcccacgcgtccgcccacgcgtccgcccacgcgtccggcgcaccccgcccccggcgccatcttcccgaccgcgagccgtccaggtctcagtgctgtgccccccccagagcctagaggatgtttcatgggatcccagccacgccgggcataggagcccctgggaacaagccggagctgtatgaggaagtgaagttgtacaagaacgcccgggagagggagaagtacgacaacatggcagagctgtttgcggtggtgaagacaatgcaagccctggagaaggcctacatcaaggactgtgtctcccccagcgagtaagagcccacgtcctgggaggtctgttcctgccctggggggcttgggtgctccataggcagcaagagcaggcgtctgtcaggctgggaggcacccacttgtgtggggcccacccagcgtgaggagggtgcccctgggtctcagccagggaagtcctgggggctggtgagggaggcgggcagaggcgcagctcctggggtgtcatccggcccactcccccaccctcatcccccagcacaggcaaccttaaaaaacggtcgagaggcttggggatgtcccaggatcttttgggggggctttgttcaatgaagtgacaagaccgtcacaggccaccgcacaggaccatgagctgtggatgcggccatcacaacagagggctggtcgctgtggttcaaaaggtgggcaggggttgggggccggggtctccacctggagccgagctacaagccccactacgtgctcagggncctcacccccaaanctactancancccctcctccttgctcggcctgcctttgcctgtcgcctggtcctctctgnanctgctctgcctctgancanccaaggggntaagataactgggtgggctggtccatgcttggnaacaactgactctcctagtnnatggaacctgntccggntctggtcaaaaaaaactgcntnagggnagttcaggggntaaaaatanctttttgaaaatttgcccaantncccctgaatgncccttgccctggancgattaagaaaaacgnccctcccntnagnaaaaaagggaacccancntttnntcnaaanggnttnccnttttttnngttangaaaanncccnggaatcncccgnnaaaancncccccnttgaaaataaaaaaannccccnannnccccccccatttngggnccaaanancnnngntnaacnnnngggtn

SEQ ID NO: 839 - DNA, 1319 bp, Homo Sapiens
  misc_feature (3)..(3): n is a, c, g, or t
  misc_feature (905)..(905): n is a, c, g, or t
  misc_feature (974)..(974): n is a, c, g, or t
  misc_feature (983)..(983): n is a, c, g, or t
  misc_feature (986)..(987): n is a, c, g, or t
  misc_feature (1004)..(1004): n is a, c, g, or t
  misc_feature (1023)..(1023): n is a, c, g, or t
  misc_feature (1028)..(1028): n is a, c, g, or t
  misc_feature (1044)..(1044): n is a, c, g, or t
  misc_feature (1052)..(1052): n is a, c, g, or t
  misc_feature (1068)..(1068): n is a, c, g, or t
  misc_feature (1070)..(1070): n is a, c, g, or t
  misc_feature (1076)..(1076): n is a, c, g, or t
  misc_feature (1080)..(1080): n is a, c, g, or t
  misc_feature (1084)..(1084): n is a, c, g, or t
  misc_feature (1086)..(1086): n is a, c, g, or t
  misc_feature (1090)..(1090): n is a, c, g, or t
  misc_feature (1095)..(1095): n is a, c, g, or t
  misc_feature (1101)..(1101): n is a, c, g, or t
  misc_feature (1104)..(1104): n is a, c, g, or t
  misc_feature (1123)..(1123): n is a, c, g, or t
  misc_feature (1127)..(1127): n is a, c, g, or t
  misc_feature (1131)..(1132): n is a, c, g, or t
  misc_feature (1135)..(1136): n is a, c, g, or t
  misc_feature (1144)..(1144): n is a, c, g, or t
  misc_feature (1146)..(1146): n is a, c, g, or t
  misc_feature (1149)..(1149): n is a, c, g, or t
  misc_feature (1151)..(1151): n is a, c, g, or t
  misc_feature (1159)..(1159): n is a, c, g, or t
  misc_feature (1162)..(1162): n is a, c, g, or t
  misc_feature (1165)..(1165): n is a, c, g, or t
  misc_feature (1172)..(1172): n is a, c, g, or t
  misc_feature (1178)..(1178): n is a, c, g, or t
  misc_feature (1181)..(1181): n is a, c, g, or t
  misc_feature (1186)..(1186): n is a, c, g, or t
  misc_feature (1193)..(1193): n is a, c, g, or t
  misc_feature (1195)..(1196): n is a, c, g, or t
  misc_feature (1198)..(1198): n is a, c, g, or t
  misc_feature (1208)..(1209): n is a, c, g, or t
  misc_feature (1220)..(1220): n is a, c, g, or t
  misc_feature (1225)..(1225): n is a, c, g, or t
  misc_feature (1247)..(1247): n is a, c, g, or t
  misc_feature (1254)..(1254): n is a, c, g, or t
  misc_feature (1271)..(1271): n is a, c, g, or t
  misc_feature (1276)..(1276): n is a, c, g, or t
  misc_feature (1283)..(1283): n is a, c, g, or t
  misc_feature (1289)..(1289): n is a, c, g, or t
  misc_feature (1291)..(1291): n is a, c, g, or t
  misc_feature (1299)..(1299): n is a, c, g, or t
  misc_feature (1303)..(1303): n is a, c, g, or t
  misc_feature (1310)..(1310): n is a, c, g, or t
  misc_feature (1313)..(1313): n is a, c, g, or t
  misc_feature (1318)..(1319): n is a, c, g, or t
atngagaaattactatgagaggatcgcatcaccatcaccatcacggatcctatttaggtgacactatagaatcgtcgacccacgcgtccgctgtcacattctatttcttcaaacattgaaagatttgtattttaatacctatccttcatcagacttcctctaattatctctaataccatactaatattcagtatccttcttagctcctccttggtcatttctaaaacaacctcctagctatgcattttgcaggaatagaagctgggtttccttaagttatggatgactctggaagcagaatatctctccttcctggagctaggtctaagaaagtgagattataatctcttatttcttcattgtcaaggtgaggcaccacctctaaaaccctggctgaaacaggaatcttcccctcacaggcacccaacctgatcttcctggcagtgagtccagaagagaaggaatcgtggatcaatgccctcaactctgccatcacccgagccaagaaccgtatcttggatgaggtcagggggctcactgtggggagagggaggaacgctggggcagagggaacagctgtgacccactgaagggggaggattgtgcaggccccgtttactcgctcctccaccagctctacttctttaccacccttttaaaagccctgatctctttctaccttctctccaagtctcatctgacacctcctcttccccgcttcatgatgggggagccagccttgggtcagcttaaagagcccccttcgtgtccagtaaatccccttgcccattcagaagcagtgaatggagtgggcacatgttcaggcctcgggatgctgggttgggacagcgagtcgctgaagagcactcatgattcacagtacatctcttcaggtcaccgttgangaggacagctatcttggccatcccactcgagacagggcaaaatccagcactcccgccgccccccaacanggggacacntannggctgtggtatgtaaantgtaaaaaacattgccaangggcnattctgtgtcagtccntctcaaanaaactgttgccccaangnatttgngggngccncntgangccanatcaanggngagggagtcctccccccangccnggcnnatnnaatcaaangnttntncccgcccntangantcaaagncccccnccnaaagntaccccntnngnaaaagggttnnccccggaaagnaaaantaccccgggggggggggctggngggaaanaaggaaacccgggggtnggggnaaagaanaaaaancngaaaaaangggnttttttngcntggcnn

SEQ ID NO: 840 - DNA, 1784 bp, Homo Sapiens
  misc_feature (2)..(2): n is a, c, g, or t
  misc_feature (8)..(8): n is a, c, g, or t
  misc_feature (11)..(13): n is a, c, g, or t
  misc_feature (15)..(15): n is a, c, g, or t
  misc_feature (18)..(19): n is a, c, g, or t
  misc_feature (27)..(27): n is a, c, g, or t
  misc_feature (32)..(32): n is a, c, g, or t
  misc_feature (38)..(39): n is a, c, g, or t
  misc_feature (46)..(46): n is a, c, g, or t
  misc_feature (53)..(53): n is a, c, g, or t
  misc_feature (57)..(57): n is a, c, g, or t
  misc_feature (59)..(59): n is a, c, g, or t
  misc_feature (74)..(76): n is a, c, g, or t
  misc_feature (78)..(78): n is a, c, g, or t
  misc_feature (80)..(80): n is a, c, g, or t
  misc_feature (83)..(83): n is a, c, g, or t
  misc_feature (88)..(88): n is a, c, g, or t
  misc_feature (91)..(91): n is a, c, g, or t
  misc_feature (97)..(97): n is a, c, g, or t
  misc_feature (101)..(101): n is a, c, g, or t
  misc_feature (114)..(114): n is a, c, g, or t
  misc_feature (116)..(116): n is a, c, g, or t
  misc_feature (119)..(120): n is a, c, g, or t
  misc_feature (123)..(123): n is a, c, g, or t
  misc_feature (130)..(130): n is a, c, g, or t
  misc_feature (134)..(134): n is a, c, g, or t
  misc_feature (140)..(141): n is a, c, g, or t
  misc_feature (145)..(145): n is a, c, g, or t
  misc_feature (147)..(147): n is a, c, g, or t
  misc_feature (153)..(153): n is a, c, g, or t
  misc_feature (155)..(155): n is a, c, g, or t
  misc_feature (173)..(173): n is a, c, g, or t
  misc_feature (177)..(177): n is a, c, g, or t
  misc_feature (181)..(181): n is a, c, g, or t
  misc_feature (183)..(183): n is a, c, g, or t
  misc_feature (185)..(185): n is a, c, g, or t
  misc_feature (187)..(187): n is a, c, g, or t
  misc_feature (190)..(190): n is a, c, g, or t
  misc_feature (209)..(209): n is a, c, g, or t
  misc_feature (213)..(213): n is a, c, g, or t
  misc_feature (215)..(216): n is a, c, g, or t
  misc_feature (221)..(222): n is a, c, g, or t
  misc_feature (224)..(224): n is a, c, g, or t
  misc_feature (231)..(231): n is a, c, g, or t
  misc_feature (234)..(234): n is a, c, g, or t
  misc_feature (236)..(236): n is a, c, g, or t
  misc_feature (244)..(244): n is a, c, g, or t
  misc_feature (247)..(247): n is a, c, g, or t
  misc_feature (250)..(253): n is a, c, g, or t
  misc_feature (255)..(255): n is a, c, g, or t
  misc_feature (258)..(258): n is a, c, g, or t
  misc_feature (264)..(266): n is a, c, g, or t
  misc_feature (270)..(270): n is a, c, g, or t
  misc_feature (283)..(283): n is a, c, g, or t
  misc_feature (288)..(288): n is a, c, g, or t
  misc_feature (298)..(299): n is a, c, g, or t
  misc_feature (303)..(304): n is a, c, g, or t
  misc_feature (314)..(314): n is a, c, g, or t
  misc_feature (321)..(321): n is a, c, g, or t
  misc_feature (324)..(324): n is a, c, g, or t
  misc_feature (329)..(330): n is a, c, g, or t
  misc_feature (333)..(336): n is a, c, g, or t
  misc_feature (346)..(350): n is a, c, g, or t
  misc_feature (352)..(352): n is a, c, g, or t
  misc_feature (355)..(356): n is a, c, g, or t
  misc_feature (359)..(359): n is a, c, g, or t
  misc_feature (363)..(363): n is a, c, g, or t
  misc_feature (369)..(369): n is a, c, g, or t
  misc_feature (379)..(380): n is a, c, g, or t
  misc_feature (383)..(385): n is a, c, g, or t
  misc_feature (387)..(387): n is a, c, g, or t
  misc_feature (390)..(390): n is a, c, g, or t
  misc_feature (394)..(394): n is a, c, g, or t
  misc_feature (397)..(397): n is a, c, g, or t
  misc_feature (402)..(403): n is a, c, g, or t
  misc_feature (410)..(410): n is a, c, g, or t
  misc_feature (414)..(416): n is a, c, g, or t
  misc_feature (419)..(419): n is a, c, g, or t
  misc_feature (426)..(428): n is a, c, g, or t
  misc_feature (431)..(431): n is a, c, g, or t
  misc_feature (434)..(434): n is a, c, g, or t
  misc_feature (438)..(438): n is a, c, g, or t
  misc_feature (440)..(440): n is a, c, g, or t
  misc_feature (443)..(443): n is a, c, g, or t
  misc_feature (445)..(445): n is a, c, g, or t
  misc_feature (449)..(451): n is a, c, g, or t
  misc_feature (459)..(459): n is a, c, g, or t
  misc_feature (462)..(463): n is a, c, g, or t
  misc_feature (465)..(465): n is a, c, g, or t
  misc_feature (468)..(469): n is a, c, g, or t
  misc_feature (471)..(471): n is a, c, g, or t
  misc_feature (475)..(476): n is a, c, g, or t
  misc_feature (480)..(480): n is a, c, g, or t
  misc_feature (483)..(483): n is a, c, g, or t
  misc_feature (487)..(487): n is a, c, g, or t
  misc_feature (491)..(491): n is a, c, g, or t
  misc_feature (496)..(497): n is a, c, g, or t
  misc_feature (499)..(499): n is a, c, g, or t
  misc_feature (502)..(502): n is a, c, g, or t
  misc_feature (510)..(510): n is a, c, g, or t
  misc_feature (513)..(513): n is a, c, g, or t
  misc_feature (517)..(517): n is a, c, g, or t
  misc_feature (520)..(520): n is a, c, g, or t
  misc_feature (523)..(523): n is a, c, g, or t
  misc_feature (528)..(529): n is a, c, g, or t
  misc_feature (535)..(536): n is a, c, g, or t
  misc_feature (542)..(542): n is a, c, g, or t
  misc_feature (545)..(546): n is a, c, g, or t
  misc_feature (548)..(548): n is a, c, g, or t
  misc_feature (553)..(553): n is a, c, g, or t
  misc_feature (555)..(555): n is a, c, g, or t
  misc_feature (557)..(557): n is a, c, g, or t
  misc_feature (561)..(561): n is a, c, g, or t
  misc_feature (563)..(563): n is a, c, g, or t
  misc_feature (571)..(571): n is a, c, g, or t
  misc_feature (575)..(575): n is a, c, g, or t
  misc_feature (578)..(578): n is a, c, g, or t
  misc_feature (584)..(584): n is a, c, g, or t
  misc_feature (586)..(588): n is a, c, g, or t
  misc_feature (593)..(593): n is a, c, g, or t
  misc_feature (610)..(610): n is a, c, g, or t
  misc_feature (612)..(612): n is a, c, g, or t
  misc_feature (614)..(615): n is a, c, g, or t
  misc_feature (619)..(619): n is a, c, g, or t
  misc_feature (621)..(622): n is a, c, g, or t
  misc_feature (624)..(624): n is a, c, g, or t
  misc_feature (627)..(627): n is a, c, g, or t
  misc_feature (632)..(632): n is a, c, g, or t
  misc_feature (636)..(637): n is a, c, g, or t
  misc_feature (639)..(640): n is a, c, g, or t
  misc_feature (643)..(644): n is a, c, g, or t
  misc_feature (646)..(646): n is a, c, g, or t
  misc_feature (652)..(652): n is a, c, g, or t
  misc_feature (655)..(656): n is a, c, g, or t
  misc_feature (659)..(659): n is a, c, g, or t
  misc_feature (662)..(662): n is a, c, g, or t
  misc_feature (667)..(667): n is a, c, g, or t
  misc_feature (669)..(669): n is a, c, g, or t
  misc_feature (673)..(675): n is a, c, g, or t
  misc_feature (678)..(679): n is a, c, g, or t
  misc_feature (681)..(682): n is a, c, g, or t
  misc_feature (686)..(687): n is a, c, g, or t
  misc_feature (689)..(690): n is a, c, g, or t
  misc_feature (694)..(696): n is a, c, g, or t
  misc_feature (700)..(700): n is a, c, g, or t
  misc_feature (703)..(703): n is a, c, g, or t
  misc_feature (708)..(708): n is a, c, g, or t
  misc_feature (710)..(710): n is a, c, g, or t
  misc_feature (712)..(712): n is a, c, g, or t
  misc_feature (721)..(723): n is a, c, g, or t
  misc_feature (726)..(726): n is a, c, g, or t
  misc_feature (731)..(733): n is a, c, g, or t
  misc_feature (737)..(737): n is a, c, g, or t
  misc_feature (740)..(740): n is a, c, g, or t
  misc_feature (742)..(742): n is a, c, g, or t
  misc_feature (745)..(745): n is a, c, g, or t
  misc_feature (750)..(750): n is a, c, g, or t
  misc_feature (756)..(756): n is a, c, g, or t
  misc_feature (760)..(761): n is a, c, g, or t
  misc_feature (769)..(769): n is a, c, g, or t
  misc_feature (776)..(776): n is a, c, g, or t
  misc_feature (780)..(780): n is a, c, g, or t
  misc_feature (783)..(783): n is a, c, g, or t
  misc_feature (786)..(787): n is a, c, g, or t
  misc_feature (792)..(792): n is a, c, g, or t
  misc_feature (794)..(794): n is a, c, g, or t
  misc_feature (798)..(799): n is a, c, g, or t
  misc_feature (802)..(802): n is a, c, g, or t
  misc_feature (804)..(804): n is a, c, g, or t
  misc_feature (806)..(808): n is a, c, g, or t
  misc_feature (810)..(810): n is a, c, g, or t
  misc_feature (812)..(813): n is a, c, g, or t
  misc_feature (815)..(815): n is a, c, g, or t
  misc_feature (817)..(818): n is a, c, g, or t
  misc_feature (821)..(823): n is a, c, g, or t
  misc_feature (830)..(833): n is a, c, g, or t
  misc_feature (835)..(835): n is a, c, g, or t
  misc_feature (837)..(839): n is a, c, g, or t
  misc_feature (843)..(844): n is a, c, g, or t
  misc_feature (846)..(846): n is a, c, g, or t
  misc_feature (851)..(851): n is a, c, g, or t
  misc_feature (854)..(854): n is a, c, g, or t
  misc_feature (856)..(856): n is a, c, g, or t
  misc_feature (859)..(859): n is a, c, g, or t
  misc_feature (862)..(862): n is a, c, g, or t
  misc_feature (865)..(865): n is a, c, g, or t
  misc_feature (868)..(869): n is a, c, g, or t
  misc_feature (873)..(875): n is a, c, g, or t
  misc_feature (885)..(885): n is a, c, g, or t
  misc_feature (889)..(889): n is a, c, g, or t
  misc_feature (891)..(891): n is a, c, g, or t
  misc_feature (894)..(897): n is a, c, g, or t
  misc_feature (899)..(899): n is a, c, g, or t
  misc_feature (901)..(901): n is a, c, g, or t
  misc_feature (905)..(906): n is a, c, g, or t
  misc_feature (908)..(910): n is a, c, g, or t
  misc_feature (912)..(912): n is a, c, g, or t
  misc_feature (915)..(915): n is a, c, g, or t
  misc_feature (917)..(918): n is a, c, g, or t
  misc_feature (920)..(920): n is a, c, g, or t
  misc_feature (922)..(922): n is a, c, g, or t
  misc_feature (925)..(926): n is a, c, g, or t
  misc_feature (929)..(929): n is a, c, g, or t
  misc_feature (931)..(931): n is a, c, g, or t
  misc_feature (944)..(945): n is a, c, g, or t
  misc_feature (949)..(949): n is a, c, g, or t
  misc_feature (952)..(952): n is a, c, g, or t
  misc_feature (959)..(960): n is a, c, g, or t
  misc_feature (962)..(963): n is a, c, g, or t
  misc_feature (969)..(969): n is a, c, g, or t
  misc_feature (972)..(972): n is a, c, g, or t
  misc_feature (974)..(974): n is a, c, g, or t
  misc_feature (976)..(976): n is a, c, g, or t
  misc_feature (978)..(978): n is a, c, g, or t
  misc_feature (981)..(981): n is a, c, g, or t
  misc_feature (985)..(985): n is a, c, g, or t
  misc_feature (989)..(989): n is a, c, g, or t
  misc_feature (993)..(993): n is a, c, g, or t
  misc_feature (997)..(997): n is a, c, g, or t
  misc_feature (999)..(999): n is a, c, g, or t
  misc_feature (1001)..(1003): n is a, c, g, or t
  misc_feature (1011)..(1012): n is a, c, g, or t
  misc_feature (1014)..(1014): n is a, c, g, or t
  misc_feature (1016)..(1016): n is a, c, g, or t
  misc_feature (1018)..(1018): n is a, c, g, or t
  misc_feature (1022)..(1022): n is a, c, g, or t
  misc_feature (1026)..(1027): n is a, c, g, or t
  misc_feature (1032)..(1034): n is a, c, g, or t
  misc_feature (1037)..(1038): n is a, c, g, or t
  misc_feature (1040)..(1040): n is a, c, g, or t
  misc_feature (1042)..(1043): n is a, c, g, or t
  misc_feature (1048)..(1048): n is a, c, g, or t
  misc_feature (1051)..(1054): n is a, c, g, or t
  misc_feature (1058)..(1058): n is a, c, g, or t
  misc_feature (1060)..(1060): n is a, c, g, or t
  misc_feature (1063)..(1065): n is a, c, g, or t
  misc_feature (1069)..(1069): n is a, c, g, or t
  misc_feature (1071)..(1071): n is a, c, g, or t
  misc_feature (1076)..(1077): n is a, c, g, or t
  misc_feature (1079)..(1081): n is a, c, g, or t
  misc_feature (1084)..(1084): n is a, c, g, or t
  misc_feature (1086)..(1089): n is a, c, g, or t
  misc_feature (1094)..(1094): n is a, c, g, or t
  misc_feature (1100)..(1102): n is a, c, g, or t
  misc_feature (1104)..(1104): n is a, c, g, or t
  misc_feature (1107)..(1107): n is a, c, g, or t
  misc_feature (1109)..(1111): n is a, c, g, or t
  misc_feature (1113)..(1115): n is a, c, g, or t
  misc_feature (1118)..(1119): n is a, c, g, or t
  misc_feature (1121)..(1121): n is a, c, g, or t
  misc_feature (1125)..(1126): n is a, c, g, or t
  misc_feature (1131)..(1131): n is a, c, g, or t
  misc_feature (1133)..(1133): n is a, c, g, or t
  misc_feature (1135)..(1135): n is a, c, g, or t
  misc_feature (1141)..(1141): n is a, c, g, or t
  misc_feature (1143)..(1145): n is a, c, g, or t
  misc_feature (1148)..(1149): n is a, c, g, or t
  misc_feature (1151)..(1151): n is a, c, g, or t
  misc_feature (1153)..(1158): n is a, c, g, or t
  misc_feature (1160)..(1161): n is a, c, g, or t
  misc_feature (1169)..(1171): n is a, c, g, or t
  misc_feature (1176)..(1176): n is a, c, g, or t
  misc_feature (1179)..(1179): n is a, c, g, or t
  misc_feature (1181)..(1181): n is a, c, g, or t
  misc_feature (1185)..(1185): n is a, c, g, or t
  misc_feature (1193)..(1193): n is a, c, g, or t
  misc_feature (1200)..(1201): n is a, c, g, or t
  misc_feature (1205)..(1205): n is a, c, g, or t
  misc_feature (1207)..(1207): n is a, c, g, or t
  misc_feature (1211)..(1211): n is a, c, g, or t
  misc_feature (1213)..(1214): n is a, c, g, or t
  misc_feature (1226)..(1227): n is a, c, g, or t
  misc_feature (1229)..(1230): n is a, c, g, or t
  misc_feature (1233)..(1234): n is a, c, g, or t
  misc_feature (1242)..(1243): n is a, c, g, or t
  misc_feature (1245)..(1245): n is a, c, g, or t
  misc_feature (1249)..(1249): n is a, c, g, or t
  misc_feature (1251)..(1251): n is a, c, g, or t
  misc_feature (1253)..(1253): n is a, c, g, or t
  misc_feature (1257)..(1258): n is a, c, g, or t
  misc_feature (1262)..(1262): n is a, c, g, or t
  misc_feature (1265)..(1266): n is a, c, g, or t
  misc_feature (1270)..(1270): n is a, c, g, or t
  misc_feature (1272)..(1272): n is a, c, g, or t
  misc_feature (1279)..(1279): n is a, c, g, or t
  misc_feature (1281)..(1284): n is a, c, g, or t
  misc_feature (1287)..(1287): n is a, c, g, or t
  misc_feature (1289)..(1289): n is a, c, g, or t
  misc_feature (1291)..(1291): n is a, c, g, or t
  misc_feature (1293)..(1296): n is a, c, g, or t
  misc_feature (1300)..(1300): n is a, c, g, or t
  misc_feature (1302)..(1303): n is a, c, g, or t
  misc_feature (1306)..(1306): n is a, c, g, or t
  misc_feature (1308)..(1309): n is a, c, g, or t
  misc_feature (1311)..(1311): n is a, c, g, or t
  misc_feature (1319)..(1319): n is a, c, g, or t
  misc_feature (1321)..(1322): n is a, c, g, or t
  misc_feature (1325)..(1327): n is a, c, g, or t
  misc_feature (1333)..(1333): n is a, c, g, or t
  misc_feature (1338)..(1339): n is a, c, g, or t
  misc_feature (1342)..(1342): n is a, c, g, or t
  misc_feature (1347)..(1350): n is a, c, g, or t
  misc_feature (1355)..(1355): n is a, c, g, or t
  misc_feature (1358)..(1358): n is a, c, g, or t
  misc_feature (1362)..(1362): n is a, c, g, or t
  misc_feature (1365)..(1367): n is a, c, g, or t
  misc_feature (1369)..(1369): n is a, c, g, or t
  misc_feature (1372)..(1372): n is a, c, g, or t
  misc_feature (1374)..(1374): n is a, c, g, or t
  misc_feature (1383)..(1383): n is a, c, g, or t
  misc_feature (1386)..(1386): n is a, c, g, or t
  misc_feature (1388)..(1388): n is a, c, g, or t
  misc_feature (1391)..(1391): n is a, c, g, or t
  misc_feature (1400)..(1400): n is a, c, g, or t
  misc_feature (1402)..(1402): n is a, c, g, or t
  misc_feature (1405)..(1405): n is a, c, g, or t
  misc_feature (1408)..(1409): n is a, c, g, or t
  misc_feature (1415)..(1417): n is a, c, g, or t
  misc_feature (1419)..(1425): n is a, c, g, or t
  misc_feature (1427)..(1428): n is a, c, g, or t
  misc_feature (1431)..(1432): n is a, c, g, or t
  misc_feature (1435)..(1435): n is a, c, g, or t
  misc_feature (1439)..(1442): n is a, c, g, or t
  misc_feature (1444)..(1444): n is a, c, g, or t
  misc_feature (1446)..(1446): n is a, c, g, or t
  misc_feature (1450)..(1451): n is a, c, g, or t
  misc_feature (1453)..(1453): n is a, c, g, or t
  misc_feature (1458)..(1459): n is a, c, g, or t
  misc_feature (1464)..(1464): n is a, c, g, or t
  misc_feature (1467)..(1468): n is a, c, g, or t
  misc_feature (1476)..(1476): n is a, c, g, or t
  misc_feature (1480)..(1480): n is a, c, g, or t
  misc_feature (1486)..(1486): n is a, c, g, or t
  misc_feature (1488)..(1491): n is a, c, g, or t
  misc_feature (1494)..(1494): n is a, c, g, or t
  misc_feature (1498)..(1498): n is a, c, g, or t
  misc_feature (1505)..(1507): n is a, c, g, or t
  misc_feature (1511)..(1511): n is a, c, g, or t
  misc_feature (1513)..(1514): n is a, c, g, or t
  misc_feature (1523)..(1523): n is a, c, g, or t
  misc_feature (1525)..(1528): n is a, c, g, or t
  misc_feature (1532)..(1532): n is a, c, g, or t
  misc_feature (1534)..(1534): n is a, c, g, or t
  misc_feature (1537)..(1537): n is a, c, g, or t
  misc_feature (1541)..(1542): n is a, c, g, or t
  misc_feature (1548)..(1551): n is a, c, g, or t
  misc_feature (1555)..(1555): n is a, c, g, or t
  misc_feature (1566)..(1566): n is a, c, g, or t
  misc_feature (1569)..(1569): n is a, c, g, or t
  misc_feature (1571)..(1571): n is a, c, g, or t
  misc_feature (1573)..(1573): n is a, c, g, or t
  misc_feature (1575)..(1575): n is a, c, g, or t
  misc_feature (1579)..(1580): n is a, c, g, or t
  misc_feature (1584)..(1584): n is a, c, g, or t
  misc_feature (1586)..(1586): n is a, c, g, or t
  misc_feature (1590)..(1590): n is a, c, g, or t
  misc_feature (1593)..(1594): n is a, c, g, or t
  misc_feature (1596)..(1597): n is a, c, g, or t
  misc_feature (1599)..(1600): n is a, c, g, or t
  misc_feature (1602)..(1602): n is a, c, g, or t
  misc_feature (1604)..(1604): n is a, c, g, or t
  misc_feature (1606)..(1606): n is a, c, g, or t
  misc_feature (1608)..(1609): n is a, c, g, or t
  misc_feature (1611)..(1613): n is a, c, g, or t
  misc_feature (1620)..(1621): n is a, c, g, or t
  misc_feature (1625)..(1626): n is a, c, g, or t
  misc_feature (1628)..(1628): n is a, c, g, or t
  misc_feature (1631)..(1633): n is a, c, g, or t
  misc_feature (1637)..(1637): n is a, c, g, or t
  misc_feature (1642)..(1642): n is a, c, g, or t
  misc_feature (1644)..(1645): n is a, c, g, or t
  misc_feature (1647)..(1647): n is a, c, g, or t
  misc_feature (1651)..(1651): n is a, c, g, or t
  misc_feature (1653)..(1654): n is a, c, g, or t
  misc_feature (1656)..(1657): n is a, c, g, or t
  misc_feature (1660)..(1660): n is a, c, g, or t
  misc_feature (1669)..(1670): n is a, c, g, or t
  misc_feature (1672)..(1672): n is a, c, g, or t
  misc_feature (1676)..(1677): n is a, c, g, or t
  misc_feature (1679)..(1679): n is a, c, g, or t
  misc_feature (1682)..(1682): n is a, c, g, or t
  misc_feature (1684)..(1684): n is a, c, g, or t
  misc_feature (1689)..(1689): n is a, c, g, or t
  misc_feature (1694)..(1694): n is a, c, g, or t
  misc_feature (1697)..(1700): n is a, c, g, or t
  misc_feature (1702)..(1702): n is a, c, g, or t
  misc_feature (1705)..(1705): n is a, c, g, or t
  misc_feature (1707)..(1707): n is a, c, g, or t
  misc_feature (1712)..(1712): n is a, c, g, or t
  misc_feature (1716)..(1716): n is a, c, g, or t
  misc_feature (1721)..(1722): n is a, c, g, or t
  misc_feature (1727)..(1727): n is a, c, g, or t
  misc_feature (1729)..(1729): n is a, c, g, or t
  misc_feature (1731)..(1731): n is a, c, g, or t
  misc_feature (1734)..(1734): n is a, c, g, or t
  misc_feature (1736)..(1737): n is a, c, g, or t
  misc_feature (1743)..(1743): n is a, c, g, or t
  misc_feature (1748)..(1748): n is a, c, g, or t
  misc_feature (1750)..(1751): n is a, c, g, or t
  misc_feature (1755)..(1756): n is a, c, g, or t
  misc_feature (1758)..(1758): n is a, c, g, or t
  misc_feature (1761)..(1761): n is a, c, g, or t
  misc_feature (1764)..(1764): n is a, c, g, or t
  misc_feature (1766)..(1768): n is a, c, g, or t
  misc_feature (1770)..(1771): n is a, c, g, or t
  misc_feature (1773)..(1774): n is a, c, g, or t
  misc_feature (1776)..(1776): n is a, c, g, or t
  misc_feature (1780)..(1780): n is a, c, g, or t
cnataatnccnnntnttnnaaataatnggggnatttgnngtggggnggggggngggngnctcttccactccccnnnancncgnaattntanagtttntagntgtgcaaaaatancnaanntanccttacnacancctcgnnttcntnggggantnccgcagtatcaagtggtnatcnagcnantncnacnggtcgtgtctgaggtcagncctncnntactnncncctgcgntcncntctgtgangcnctnnnnanggnaacccnnngaancaattgtgactantatanttgaagtgannatannataccatacncaggtgnganagtgnntannnnatttctgtgnnnnncnctnncangttntcctanccagaacacnngtnnntntcnaaangangactnnctccccnacannncanggcttcnnngtnctncgantnccncngcgnnncagccganctnngnaannangcgnnaccnctntgangtgncagtnncnccncagtttgntcnttgnganganggctnnactacnnggaatnccnngnaacanantncaanancgactaantatnctntcaagngnnnatggncctgacctcagcacatntncnncggngnntnccntcccncatnnannaanncntggtgnacnnctnaantactnanaggnnnccnncnnaganntnntagnnngaancantgatnanancattacatnnntcnctacnnngacnctngntcngcacnaagagntcannataaaagngaccttncctngtnaannaaacngngtcnngananannngncnncncnnagnnncatatcnnnngnannnctcnnanggaanatnanacntgnggntannatgnnncttccccgtnactngntannnncncntttnntnnntnctntnncnanacnnatngnaaaccgattccannctcntgnccaaacnncnncggaanacncncngntanacanggantacnttancnannncatgtggnntncncnatcnacgnnttggnnnctnnantnngaacnatnnnnactntnctnnntagntnacatnncnnnaancnnnngaacnaacacnnncnacncnnncnnntannancgannacagnananaacccncnnnatnntngnnnnnncnncgccaaannnatagnctntnacanactgatcnatcctcnnaacnangtcnanngtctcacaggcnncnnacnnaatcactnnanagantntnccannattnacnnccanangcactantnnnnatnanantnnnngccncnnatncnnantacagtanannttnnnatattncagcnnggngaagnnnnacaantcntggnttnnngnacntnctgataaantantnaanttcataacntnaancanntcatgnnncnnnnnnntnnccnncgnctannnnantnacanngnagcanntggangannatcattantaantccagnannnngtngaantaattannnccgncnnacatcttancnnnntaananganctannatactnnnncatnaaaaaattttnctntncncncctnngacntncaanctnnanntnntncntnanntnnnacagaannctanncnaannntcanagtanannantgcnanntnnttnagcgtcacnnangaanntntangntattnctacnctnnnncnccnangctancaancttannattancngnctntnncactcncaagntnntaanncnatngtncnnntnntnngntcanagag

SEQ ID NO: 841 - DNA, 1387 bp, Homo Sapiens
  misc_feature (836)..(836): n is a, c, g, or t
  misc_feature (882)..(883): n is a, c, g, or t
  misc_feature (887)..(887): n is a, c, g, or t
  misc_feature (890)..(894): n is a, c, g, or t
  misc_feature (896)..(896): n is a, c, g, or t
  misc_feature (899)..(899): n is a, c, g, or t
  misc_feature (901)..(923): n is a, c, g, or t
  misc_feature (925)..(925): n is a, c, g, or t
  misc_feature (927)..(935): n is a, c, g, or t
  misc_feature (937)..(937): n is a, c, g, or t
  misc_feature (939)..(943): n is a, c, g, or t
  misc_feature (946)..(960): n is a, c, g, or t
  misc_feature (969)..(969): n is a, c, g, or t
  misc_feature (972)..(972): n is a, c, g, or t
  misc_feature (976)..(977): n is a, c, g, or t
  misc_feature (985)..(987): n is a, c, g, or t
  misc_feature (995)..(995): n is a, c, g, or t
  misc_feature (1000)..(1000): n is a, c, g, or t
  misc_feature (1006)..(1007): n is a, c, g, or t
  misc_feature (1009)..(1009): n is a, c, g, or t
  misc_feature (1016)..(1016): n is a, c, g, or t
  misc_feature (1021)..(1021): n is a, c, g, or t
  misc_feature (1032)..(1032): n is a, c, g, or t
  misc_feature (1037)..(1037): n is a, c, g, or t
  misc_feature (1040)..(1040): n is a, c, g, or t
  misc_feature (1044)..(1044): n is a, c, g, or t
  misc_feature (1050)..(1050): n is a, c, g, or t
  misc_feature (1054)..(1054): n is a, c, g, or t
  misc_feature (1071)..(1071): n is a, c, g, or t
  misc_feature (1074)..(1075): n is a, c, g, or t
  misc_feature (1077)..(1077): n is a, c, g, or t
  misc_feature (1080)..(1080): n is a, c, g, or t
  misc_feature (1091)..(1091): n is a, c, g, or t
  misc_feature (1097)..(1097): n is a, c, g, or t
  misc_feature (1104)..(1104): n is a, c, g, or t
  misc_feature (1112)..(1112): n is a, c, g, or t
  misc_feature (1116)..(1116): n is a, c, g, or t
  misc_feature (1118)..(1118): n is a, c, g, or t
  misc_feature (1123)..(1123): n is a, c, g, or t
  misc_feature (1126)..(1126): n is a, c, g, or t
  misc_feature (1133)..(1133): n is a, c, g, or t
  misc_feature (1135)..(1136): n is a, c, g, or t
  misc_feature (1139)..(1140): n is a, c, g, or t
  misc_feature (1148)..(1148): n is a, c, g, or t
  misc_feature (1150)..(1151): n is a, c, g, or t
  misc_feature (1159)..(1160): n is a, c, g, or t
  misc_feature (1166)..(1166): n is a, c, g, or t
  misc_feature (1173)..(1173): n is a, c, g, or t
  misc_feature (1175)..(1175): n is a, c, g, or t
  misc_feature (1178)..(1179): n is a, c, g, or t
  misc_feature (1183)..(1184): n is a, c, g, or t
  misc_feature (1187)..(1187): n is a, c, g, or t
  misc_feature (1189)..(1190): n is a, c, g, or t
  misc_feature (1201)..(1202): n is a, c, g, or t
  misc_feature (1210)..(1212): n is a, c, g, or t
  misc_feature (1215)..(1216): n is a, c, g, or t
  misc_feature (1218)..(1218): n is a, c, g, or t
  misc_feature (1221)..(1222): n is a, c, g, or t
  misc_feature (1231)..(1231): n is a, c, g, or t
  misc_feature (1233)..(1233): n is a, c, g, or t
  misc_feature (1236)..(1239): n is a, c, g, or t
  misc_feature (1242)..(1242): n is a, c, g, or t
  misc_feature (1244)..(1245): n is a, c, g, or t
  misc_feature (1258)..(1258): n is a, c, g, or t
  misc_feature (1269)..(1269): n is a, c, g, or t
  misc_feature (1272)..(1272): n is a, c, g, or t
  misc_feature (1277)..(1279): n is a, c, g, or t
  misc_feature (1281)..(1281): n is a, c, g, or t
  misc_feature (1286)..(1287): n is a, c, g, or t
  misc_feature (1293)..(1293): n is a, c, g, or t
  misc_feature (1298)..(1299): n is a, c, g, or t
  misc_feature (1303)..(1306): n is a, c, g, or t
  misc_feature (1311)..(1311): n is a, c, g, or t
  misc_feature (1317)..(1317): n is a, c, g, or t
  misc_feature (1325)..(1327): n is a, c, g, or t
  misc_feature (1330)..(1330): n is a, c, g, or t
  misc_feature (1334)..(1334): n is a, c, g, or t
  misc_feature (1339)..(1339): n is a, c, g, or t
  misc_feature (1341)..(1342): n is a, c, g, or t
  misc_feature (1347)..(1347): n is a, c, g, or t
  misc_feature (1352)..(1352): n is a, c, g, or t
  misc_feature (1363)..(1363): n is a, c, g, or t
  misc_feature (1367)..(1367): n is a, c, g, or t
  misc_feature (1378)..(1378): n is a, c, g, or t
  misc_feature (1382)..(1382): n is a, c, g, or t
tagagaaattactatgagaggatcgcatcaccatcaccatcacggatcctatttaggtgacactatagaatcgtcgacccacgcgtccgcggacgggccctgctgctcgcatcccagcgcggtgctcggcgtacagcagacgctggaggagatggacttcgagaggggaatctggtcggcagccctgaatggagacctgggccgagtgaagcatttaatccagaaggccgaggacccaagtcagcccgactcggccggctacactgcgctgcactatgccagccgcaatgggcactacgctgtgtgccagttcctgctggaaagcggagctaagtgtgatgcccagacccacgggggtgccactgctctgcaccgagccagctactgcgggcacactgaaatcgcgcggctcctgctatcacatgggtccaaccccagggtggtggatgacgacggcatgaccagtctgcataaggctgctgagaggggtcacggggacatctgctccctcctcctgcaacacagcccagccctgaaggccatccgggaccgaaaggcacggctagcatgtgacctgctgccttgcaacagtgacctgcgggacctgctatccagctgagccgccaccctatctccagctgcctttaaagggtacacagaccagttctccaagcccctgccttggtcagcatccatgctgctgggcagggaactgaggccagaccacccaggaagagccccagtctggtcactgtggaagcgagggagtagatttggtgtggctaaaagtgtttaagactggacagatgatcatattctaaattagttcatatganacatctatttatttggaaaaaaaataaaagttatatccttacctcnnaaanaannnnnanaanannnnnnnnnnnnnnnnnnnnnnnanannnnnnnnnanannnnnaannnnnnnnnnnnnnnggggggccnctncccnnaaaggaannnaattaacnttaantaaccnnancttgaantcctnttaaaaaatcnaaaangancccnaaaacncccnttggattttttcaaaanccnngnttngccccgggggntttttnttggganaaatccanttantnggganaanttttggnanntannaacttaangnnaaaaaaanntggatncccccgntnatnntccnnggncnnaaaaaaatttnnggattttnnnttnncnagnncaaaacaananttnnnngananngccttttaaaccnaaaaaaaaaanaanttttnnncnttttnntttttnccccnnaaannnnccaantttagnaaaaaagnnnggnaagnaattncnntttcnttttnaaaaaaatttncttnaaaaaaaattntttnataaa

SEQ ID NO: 842 - DNA, 1485 bp, Homo Sapiens
  misc_feature (3)..(5): n is a, c, g, or t
  misc_feature (7)..(7): n is a, c, g, or t
  misc_feature (10)..(10): n is a, c, g, or t
  misc_feature (14)..(14): n is a, c, g, or t
  misc_feature (17)..(18): n is a, c, g, or t
  misc_feature (22)..(22): n is a, c, g, or t
  misc_feature (25)..(25): n is a, c, g, or t
  misc_feature (32)..(32): n is a, c, g, or t
  misc_feature (42)..(42): n is a, c, g, or t
  misc_feature (502)..(502): n is a, c, g, or t
  misc_feature (518)..(518): n is a, c, g, or t
  misc_feature (525)..(525): n is a, c, g, or t
  misc_feature (527)..(527): n is a, c, g, or t
  misc_feature (555)..(555): n is a, c, g, or t
  misc_feature (562)..(562): n is a, c, g, or t
  misc_feature (568)..(569): n is a, c, g, or t
  misc_feature (573)..(573): n is a, c, g, or t
  misc_feature (575)..(575): n is a, c, g, or t
  misc_feature (590)..(590): n is a, c, g, or t
  misc_feature (593)..(593): n is a, c, g, or t
  misc_feature (595)..(597): n is a, c, g, or t
  misc_feature (610)..(610): n is a, c, g, or t
  misc_feature (612)..(612): n is a, c, g, or t
  misc_feature (615)..(616): n is a, c, g, or t
  misc_feature (620)..(620): n is a, c, g, or t
  misc_feature (624)..(624): n is a, c, g, or t
  misc_feature (626)..(626): n is a, c, g, or t
  misc_feature (635)..(636): n is a, c, g, or t
  misc_feature (638)..(638): n is a, c, g, or t
  misc_feature (655)..(655): n is a, c, g, or t
  misc_feature (662)..(662): n is a, c, g, or t
  misc_feature (667)..(668): n is a, c, g, or t
  misc_feature (670)..(670): n is a, c, g, or t
  misc_feature (677)..(677): n is a, c, g, or t
  misc_feature (680)..(680): n is a, c, g, or t
  misc_feature (683)..(684): n is a, c, g, or t
  misc_feature (686)..(686): n is a, c, g, or t
  misc_feature (693)..(693): n is a, c, g, or t
  misc_feature (695)..(698): n is a, c, g, or t
  misc_feature (700)..(701): n is a, c, g, or t
  misc_feature (703)..(703): n is a, c, g, or t
  misc_feature (707)..(708): n is a, c, g, or t
  misc_feature (715)..(716): n is a, c, g, or t
  misc_feature (718)..(718): n is a, c, g, or t
  misc_feature (726)..(727): n is a, c, g, or t
  misc_feature (734)..(734): n is a, c, g, or t
  misc_feature (736)..(737): n is a, c, g, or t
  misc_feature (740)..(740): n is a, c, g, or t
  misc_feature (743)..(744): n is a, c, g, or t
  misc_feature (746)..(746): n is a, c, g, or t
  misc_feature (752)..(753): n is a, c, g, or t
  misc_feature (758)..(758): n is a, c, g, or t
  misc_feature (766)..(766): n is a, c, g, or t
  misc_feature (768)..(769): n is a, c, g, or t
  misc_feature (772)..(772): n is a, c, g, or t
  misc_feature (774)..(774): n is a, c, g, or t
  misc_feature (776)..(777): n is a, c, g, or t
  misc_feature (780)..(783): n is a, c, g, or t
  misc_feature (785)..(785): n is a, c, g, or t
  misc_feature (787)..(787): n is a, c, g, or t
  misc_feature (789)..(791): n is a, c, g, or t
  misc_feature (795)..(795): n is a, c, g, or t
  misc_feature (797)..(797): n is a, c, g, or t
  misc_feature (799)..(800): n is a, c, g, or t
  misc_feature (802)..(804): n is a, c, g, or t
  misc_feature (806)..(808): n is a, c, g, or t
  misc_feature (810)..(810): n is a, c, g, or t
  misc_feature (812)..(814): n is a, c, g, or t
  misc_feature (816)..(816): n is a, c, g, or t
  misc_feature (819)..(819): n is a, c, g, or t
  misc_feature (828)..(828): n is a, c, g, or t
  misc_feature (832)..(832): n is a, c, g, or t
  misc_feature (837)..(839): n is a, c, g, or t
  misc_feature (841)..(842): n is a, c, g, or t
  misc_feature (852)..(852): n is a, c, g, or t
  misc_feature (860)..(860): n is a, c, g, or t
  misc_feature (862)..(862): n is a, c, g, or t
  misc_feature (865)..(866): n is a, c, g, or t
  misc_feature (868)..(868): n is a, c, g, or t
  misc_feature (870)..(870): n is a, c, g, or t
  misc_feature (873)..(874): n is a, c, g, or t
  misc_feature (876)..(876): n is a, c, g, or t
  misc_feature (879)..(879): n is a, c, g, or t
  misc_feature (882)..(882): n is a, c, g, or t
  misc_feature (884)..(884): n is a, c, g, or t
  misc_feature (886)..(887): n is a, c, g, or t
  misc_feature (891)..(893): n is a, c, g, or t
  misc_feature (895)..(898): n is a, c, g, or t
  misc_feature (900)..(900): n is a, c, g, or t
  misc_feature (904)..(905): n is a, c, g, or t
  misc_feature (907)..(909): n is a, c, g, or t
  misc_feature (911)..(912): n is a, c, g, or t
  misc_feature (924)..(924): n is a, c, g, or t
  misc_feature (927)..(927): n is a, c, g, or t
  misc_feature (933)..(933): n is a, c, g, or t
  misc_feature (935)..(936): n is a, c, g, or t
  misc_feature (938)..(938): n is a, c, g, or t
  misc_feature (942)..(944): n is a, c, g, or t
  misc_feature (947)..(947): n is a, c, g, or t
  misc_feature (954)..(954): n is a, c, g, or t
  misc_feature (960)..(961): n is a, c, g, or t
  misc_feature (965)..(966): n is a, c, g, or t
  misc_feature (968)..(970): n is a, c, g, or t
  misc_feature (974)..(975): n is a, c, g, or t
  misc_feature (977)..(977): n is a, c, g, or t
  misc_feature (982)..(982): n is a, c, g, or t
  misc_feature (984)..(985): n is a, c, g, or t
  misc_feature (989)..(989): n is a, c, g, or t
  misc_feature (993)..(993): n is a, c, g, or t
  misc_feature (998)..(1000): n is a, c, g, or t
  misc_feature (1006)..(1006): n is a, c, g, or t
  misc_feature (1008)..(1010): n is a, c, g, or t
  misc_feature (1016)..(1016): n is a, c, g, or t
  misc_feature (1021)..(1021): n is a, c, g, or t
  misc_feature (1027)..(1027): n is a, c, g, or t
  misc_feature (1031)..(1032): n is a, c, g, or t
  misc_feature (1035)..(1035): n is a, c, g, or t
  misc_feature (1040)..(1042): n is a, c, g, or t
  misc_feature (1049)..(1049): n is a, c, g, or t
  misc_feature (1064)..(1064): n is a, c, g, or t
  misc_feature (1068)..(1070): n is a, c, g, or t
  misc_feature (1076)..(1076): n is a, c, g, or t
  misc_feature (1080)..(1080): n is a, c, g, or t
  misc_feature (1084)..(1084): n is a, c, g, or t
  misc_feature (1092)..(1092): n is a, c, g, or t
  misc_feature (1095)..(1095): n is a, c, g, or t
  misc_feature (1101)..(1103): n is a, c, g, or t
  misc_feature (1106)..(1106): n is a, c, g, or t
  misc_feature (1108)..(1108): n is a, c, g, or t
  misc_feature (1112)..(1113): n is a, c, g, or t
  misc_feature (1115)..(1115): n is a, c, g, or t
  misc_feature (1118)..(1118): n is a, c, g, or t
  misc_feature (1120)..(1120): n is a, c, g, or t
  misc_feature (1123)..(1123): n is a, c, g, or t
  misc_feature (1131)..(1132): n is a, c, g, or t
  misc_feature (1134)..(1135): n is a, c, g, or t
  misc_feature (1139)..(1140): n is a, c, g, or t
  misc_feature (1142)..(1143): n is a, c, g, or t
  misc_feature (1146)..(1146): n is a, c, g, or t
  misc_feature (1149)..(1149): n is a, c, g, or t
  misc_feature (1156)..(1156): n is a, c, g, or t
  misc_feature (1158)..(1158): n is a, c, g, or t
  misc_feature (1165)..(1167): n is a, c, g, or t
  misc_feature (1171)..(1171): n is a, c, g, or t
  misc_feature (1174)..(1174): n is a, c, g, or t
  misc_feature (1180)..(1180): n is a, c, g, or t
  misc_feature (1185)..(1186): n is a, c, g, or t
  misc_feature (1188)..(1190): n is a, c, g, or t
  misc_feature (1192)..(1194): n is a, c, g, or t
  misc_feature (1201)..(1202): n is a, c, g, or t
  misc_feature (1206)..(1206): n is a, c, g, or t
  misc_feature (1209)..(1210): n is a, c, g, or t
  misc_feature (1219)..(1221): n is a, c, g, or t
  misc_feature (1228)..(1228): n is a, c, g, or t
  misc_feature (1232)..(1232): n is a, c, g, or t
  misc_feature (1239)..(1239): n is a, c, g, or t
  misc_feature (1241)..(1241): n is a, c, g, or t
  misc_feature (1243)..(1243): n is a, c, g, or t
  misc_feature (1245)..(1245): n is a, c, g, or t
  misc_feature (1252)..(1252): n is a, c, g, or t
  misc_feature (1263)..(1266): n is a, c, g, or t
  misc_feature (1277)..(1277): n is a, c, g, or t
  misc_feature (1282)..(1283): n is a, c, g, or t
  misc_feature (1293)..(1293): n is a, c, g, or t
  misc_feature (1296)..(1296): n is a, c, g, or t
  misc_feature (1300)..(1300): n is a, c, g, or t
  misc_feature (1303)..(1303): n is a, c, g, or t
  misc_feature (1311)..(1312): n is a, c, g, or t
  misc_feature (1319)..(1319): n is a, c, g, or t
  misc_feature (1322)..(1323): n is a, c, g, or t
  misc_feature (1328)..(1328): n is a, c, g, or t
  misc_feature (1333)..(1333): n is a, c, g, or t
  misc_feature (1339)..(1340): n is a, c, g, or t
  misc_feature (1343)..(1343): n is a, c, g, or t
  misc_feature (1346)..(1346): n is a, c, g, or t
  misc_feature (1348)..(1348): n is a, c, g, or t
  misc_feature (1351)..(1352): n is a, c, g, or t
  misc_feature (1355)..(1356): n is a, c, g, or t
  misc_feature (1358)..(1358): n is a, c, g, or t
  misc_feature (1372)..(1372): n is a, c, g, or t
  misc_feature (1375)..(1375): n is a, c, g, or t
  misc_feature (1381)..(1381): n is a, c, g, or t
  misc_feature (1383)..(1384): n is a, c, g, or t
  misc_feature (1392)..(1392): n is a, c, g, or t
  misc_feature (1395)..(1395): n is a, c, g, or t
  misc_feature (1401)..(1401): n is a, c, g, or t
  misc_feature (1406)..(1406): n is a, c, g, or t
  misc_feature (1412)..(1412): n is a, c, g, or t
  misc_feature (1414)..(1415): n is a, c, g, or t
  misc_feature (1419)..(1419): n is a, c, g, or t
  misc_feature (1427)..(1427): n is a, c, g, or t
  misc_feature (1429)..(1429): n is a, c, g, or t
  misc_feature (1435)..(1435): n is a, c, g, or t
  misc_feature (1440)..(1440): n is a, c, g, or t
  misc_feature (1444)..(1445): n is a, c, g, or t
  misc_feature (1450)..(1450): n is a, c, g, or t
  misc_feature (1462)..(1462): n is a, c, g, or t
  misc_feature (1469)..(1469): n is a, c, g, or t
  misc_feature (1471)..(1472): n is a, c, g, or t
  misc_feature (1475)..(1475): n is a, c, g, or t
tcnnntncancganatnnttgnttncgggtgngtggatcgcntcccatcgccatcacggatcctatttaggtgacactatagaatcgtcgacccacgcgtccggcagccacaggagagccatcctcatggagctagaacgtgtcaaagcattaggcgtgaagcccccccagaatctctgggaatataaggctgtgaacccaggcaggtccctgttcctgctatacgccctcaagagctcccccaggctgagtctgctctacctgtacctgtttgactacaccgacaccttcctacctttcatccacaccatctgccctctgcaagaagacagctctggggaggacatcgtcaccaagcttctggatcttaaggagcctacgtggaagcagtggagagagttcctggtcaaatactccttccttccataccagctgattgctgagtttgcttgggactggttggaggtccattactggacatcacggtttctcatcatcaaangctatgttactctcanttctggnantattctccttttggagaatctggtcganaattganctgaannaccntncctcaaaagatgtgnaancnnntttctggaaagtntncanngtcngggngnttttttgtnngnccatgttctggtccccntcatccnctcanntntgttttncanaanngnttgtttntnnnngnncnatgnnctttatnncnaatttttnnaacattngnnttnttnnangtttannaaganaatctctnanntgntntnnttnnnncnancnnntttntntnnannntnnnanannncntcncttctttanactnttttnnntnncactattttnaaaatatncntanntntnttnntntanaantnanngttnnntnnnntnatanntnnntnntttccttatttnaantattantnnanatannnacnaatagtnagattnnattnntnnnaatnntnaaagntnntaanatantatcnnntaatcnannnatatancttcnatcatntacnntcnttatnnnaataacnttatattgattcatnattnnnaataanttantganttattttnatnatttannnctntnatcnnanctnantantatcttannanntttnnanntcntcntcttatnantttaatnnncctnctntttatntttanntnnntnnngttcttnntctnatnnttactattnnnatttatnttancttctancntncnatatttnttttaattgtnnnnttatcatttancttannatacaccttnttntaanttncaactctnnacgaagnatnnttatnattgnattacnnatntgntnctnnganncntaatatatacaatncantctgtnannataactantcnatcatntattnatatcnanntatnaatatgtntnatgtgnatcancatnntcatnaagtatatgctntctattntnnaanatcttatata

SEQ ID NO: 843 - DNA, 1200 bp, Homo Sapiens
  misc_feature (104)..(104): n is a, c, g, or t
  misc_feature (112)..(112): n is a, c, g, or t
  misc_feature (378)..(378): n is a, c, g, or t
  misc_feature (573)..(573): n is a, c, g, or t
  misc_feature (592)..(592): n is a, c, g, or t
  misc_feature (616)..(616): n is a, c, g, or t
  misc_feature (618)..(618): n is a, c, g, or t
  misc_feature (635)..(636): n is a, c, g, or t
  misc_feature (690)..(690): n is a, c, g, or t
  misc_feature (697)..(697): n is a, c, g, or t
  misc_feature (699)..(699): n is a, c, g, or t
  misc_feature (702)..(702): n is a, c, g, or t
  misc_feature (720)..(720): n is a, c, g, or t
  misc_feature (734)..(734): n is a, c, g, or t
  misc_feature (736)..(736): n is a, c, g, or t
  misc_feature (751)..(751): n is a, c, g, or t
  misc_feature (777)..(777): n is a, c, g, or t
  misc_feature (794)..(794): n is a, c, g, or t
  misc_feature (799)..(799): n is a, c, g, or t
  misc_feature (804)..(804): n is a, c, g, or t
  misc_feature (809)..(809): n is a, c, g, or t
  misc_feature (817)..(817): n is a, c, g, or t
  misc_feature (821)..(821): n is a, c, g, or t
  misc_feature (835)..(835): n is a, c, g, or t
  misc_feature (843)..(843): n is a, c, g, or t
  misc_feature (847)..(847): n is a, c, g, or t
  misc_feature (865)..(865): n is a, c, g, or t
  misc_feature (871)..(871): n is a, c, g, or t
  misc_feature (894)..(894): n is a, c, g, or t
  misc_feature (905)..(905): n is a, c, g, or t
  misc_feature (923)..(923): n is a, c, g, or t
  misc_feature (935)..(935): n is a, c, g, or t
  misc_feature (937)..(937): n is a, c, g, or t
  misc_feature (939)..(942): n is a, c, g, or t
  misc_feature (948)..(948): n is a, c, g, or t
  misc_feature (956)..(956): n is a, c, g, or t
  misc_feature (958)..(960): n is a, c, g, or t
  misc_feature (973)..(973): n is a, c, g, or t
  misc_feature (981)..(981): n is a, c, g, or t
  misc_feature (993)..(993): n is a, c, g, or t
  misc_feature (1009)..(1009): n is a, c, g, or t
  misc_feature (1021)..(1021): n is a, c, g, or t
  misc_feature (1024)..(1024): n is a, c, g, or t
  misc_feature (1031)..(1031): n is a, c, g, or t
  misc_feature (1037)..(1037): n is a, c, g, or t
  misc_feature (1039)..(1040): n is a, c, g, or t
  misc_feature (1043)..(1044): n is a, c, g, or t
  misc_feature (1057)..(1057): n is a, c, g, or t
  misc_feature (1059)..(1059): n is a, c, g, or t
  misc_feature (1064)..(1066): n is a, c, g, or t
  misc_feature (1070)..(1070): n is a, c, g, or t
  misc_feature (1072)..(1074): n is a, c, g, or t
  misc_feature (1076)..(1078): n is a, c, g, or t
  misc_feature (1080)..(1080): n is a, c, g, or t
  misc_feature (1090)..(1091): n is a, c, g, or t
  misc_feature (1094)..(1094): n is a, c, g, or t
  misc_feature (1098)..(1098): n is a, c, g, or t
  misc_feature (1102)..(1102): n is a, c, g, or t
  misc_feature (1107)..(1107): n is a, c, g, or t
  misc_feature (1112)..(1112): n is a, c, g, or t
  misc_feature (1118)..(1118): n is a, c, g, or t
  misc_feature (1122)..(1122): n is a, c, g, or t
  misc_feature (1125)..(1125): n is a, c, g, or t
  misc_feature (1127)..(1127): n is a, c, g, or t
  misc_feature (1135)..(1135): n is a, c, g, or t
  misc_feature (1141)..(1143): n is a, c, g, or t
  misc_feature (1146)..(1146): n is a, c, g, or t
  misc_feature (1148)..(1149): n is a, c, g, or t
  misc_feature (1151)..(1151): n is a, c, g, or t
  misc_feature (1160)..(1160): n is a, c, g, or t
  misc_feature (1167)..(1167): n is a, c, g, or t
  misc_feature (1174)..(1175): n is a, c, g, or t
  misc_feature (1182)..(1182): n is a, c, g, or t
  misc_feature (1189)..(1189): n is a, c, g, or t
  misc_feature (1199)..(1199): n is a, c, g, or t
aatagagaaattactatgagaggatcgcatcaccatcaccatcacggtatcctatttaggtgacactatagaatcgtcgacccacgcgttccgcccacgcgtcnggtacgcntccccacgaggggctggttcctgaaaggatgtacagaggatccccaaccgcctgcgaaacccaagccgccgcgtaggagcgtgcgttcgggccctcttctcccacctgttcgactccccatccccaggatgtcaacctcagtccctcaaggccatacctggacccaacgggtgaagaaagacgatgaggaggaggacccgctggaccagctgatctcccgctctggctgtgctgcctcccactttgcagtgcaggagtgcatggcncagcaccaggactggcggcaatgccagccacaggtgcaggcgttcaaggattgcatgagtgaacagcaggcgaggcggcaagaggagctgcagaggaggcaagaacaagccggtgcccaccactgagaccccaaaccacctatccccagtagatggccctgccaagaccaacacccagcaagattatagaggaanaaatcctaaatgctggtgngggaggtctaaaacatagggagtnancatggggtgggtcacannaacgtatttgatcaggcaaagaggaaatcttgccatccaagcctgttccctccngataaangnggntaattcttatgtcataancccatataaatgangnaatgaaacatacgtnactattaataaaaaagtgtttaaaanttattgggcaatttaantgaanacatnctggnttccatancctnctctcattcccaantgagggtnctanccttcacatccctagttnaccccnatgaactaagctttggtgacttnggaacaatttnttttaaaatccccaagantctgtttttttncntnnnnaaaaantggcatanannnataacttttttcnaaagcctncaaaaacaaaanaaatgggctttccctnattagggatttnttnaaaaganttgaantnnaannttttgtttttaancntaaannnaaancnnncnnncncaatattaannatntttnatgngaaangtttnacctantaancantntaactccntatttnnngtntnnancaaaaaaanggtcctnaatattnnctttttncaaatcncaatttttana

SEQ ID NO: 844 - DNA, 1359 bp, Homo Sapiens
  misc_feature (910)..(910): n is a, c, g, or t
  misc_feature (971)..(971): n is a, c, g, or t
  misc_feature (979)..(979): n is a, c, g, or t
  misc_feature (985)..(985): n is a, c, g, or t
  misc_feature (987)..(988): n is a, c, g, or t
  misc_feature (994)..(994): n is a, c, g, or t
  misc_feature (999)..(999): n is a, c, g, or t
  misc_feature (1002)..(1002): n is a, c, g, or t
  misc_feature (1015)..(1015): n is a, c, g, or t
  misc_feature (1024)..(1024): n is a, c, g, or t
  misc_feature (1044)..(1044): n is a, c, g, or t
  misc_feature (1046)..(1047): n is a, c, g, or t
  misc_feature (1057)..(1058): n is a, c, g, or t
  misc_feature (1101)..(1101): n is a, c, g, or t
  misc_feature (1111)..(1111): n is a, c, g, or t
  misc_feature (1119)..(1119): n is a, c, g, or t
  misc_feature (1122)..(1122): n is a, c, g, or t
  misc_feature (1138)..(1138): n is a, c, g, or t
  misc_feature (1143)..(1143): n is a, c, g, or t
  misc_feature (1145)..(1145): n is a, c, g, or t
  misc_feature (1151)..(1151): n is a, c, g, or t
  misc_feature (1153)..(1154): n is a, c, g, or t
  misc_feature (1170)..(1170): n is a, c, g, or t
  misc_feature (1173)..(1173): n is a, c, g, or t
  misc_feature (1176)..(1176): n is a, c, g, or t
  misc_feature (1180)..(1180): n is a, c, g, or t
  misc_feature (1185)..(1186): n is a, c, g, or t
  misc_feature (1193)..(1193): n is a, c, g, or t
  misc_feature (1195)..(1195): n is a, c, g, or t
  misc_feature (1202)..(1206): n is a, c, g, or t
  misc_feature (1209)..(1209): n is a, c, g, or t
  misc_feature (1212)..(1212): n is a, c, g, or t
  misc_feature (1214)..(1214): n is a, c, g, or t
  misc_feature (1217)..(1217): n is a, c, g, or t
  misc_feature (1219)..(1219): n is a, c, g, or t
  misc_feature (1229)..(1229): n is a, c, g, or t
  misc_feature (1236)..(1236): n is a, c, g, or t
  misc_feature (1241)..(1242): n is a, c, g, or t
  misc_feature (1247)..(1247): n is a, c, g, or t
  misc_feature (1251)..(1251): n is a, c, g, or t
  misc_feature (1259)..(1259): n is a, c, g, or t
  misc_feature (1261)..(1261): n is a, c, g, or t
  misc_feature (1263)..(1263): n is a, c, g, or t
  misc_feature (1270)..(1271): n is a, c, g, or t
  misc_feature (1273)..(1273): n is a, c, g, or t
  misc_feature (1287)..(1287): n is a, c, g, or t
  misc_feature (1289)..(1289): n is a, c, g, or t
  misc_feature (1294)..(1294): n is a, c, g, or t
  misc_feature (1296)..(1296): n is a, c, g, or t
  misc_feature (1302)..(1302): n is a, c, g, or t
  misc_feature (1310)..(1310): n is a, c, g, or t
  misc_feature (1313)..(1313): n is a, c, g, or t
  misc_feature (1319)..(1324): n is a, c, g, or t
  misc_feature (1328)..(1328): n is a, c, g, or t
  misc_feature (1330)..(1330): n is a, c, g, or t
  misc_feature (1334)..(1334): n is a, c, g, or t
  misc_feature (1336)..(1336): n is a, c, g, or t
  misc_feature (1339)..(1340): n is a, c, g, or t
  misc_feature (1350)..(1350): n is a, c, g, or t
  misc_feature (1354)..(1355): n is a, c, g, or t
attagagaaattactatgagaggatcgcatcaccatcaccatcacggatcctatttaggtgacactatagaatcgtcgacccacgcgtccgcccacgcgtccgatgaaaagaaccctgcctacgaggtggatgttcaggcaagggacctgggtcccaatcctatcccagcccattgcaaagttctcatcaaggttctggatgtcaatgacaacatcccaagcatccacgtcacatgggcctcccagccatcactggtgtcagaagctcttcccaaggacagttttattgctcttgtcatggcagatgacttggattcaggacacaatggtttggtccactgctggctgagccaagagctgggccacttcaggctgaaaagaactaatggcaacacatacatgttgctaaccaatgccacactggacagagagcagtggcccaaatataccctcactctgttagcccaagaccaaggactccagcccttatcagccaagaaacagctcagcattcagatcagtgacatcaacgacaatgcacctgtgtttgagaaaagcaggtatgaagtctccacgcgggaaaacaacttaccctctcttcacctcattaccatcaaggctcatgatgcagacttgggcattaatggaaaagtctcataccgcatccaggactccccagttgctcacttagtagctattgactccaacacaggagaggtcactgctcagaggtcactgaactatgaagagatggccggctttgagttccaggtgatcgcagaggacagcgggcaacccatgcttgcatccagtgtctctgtgtgggtcagcctcttggatgccaatgataatgccccaaaggtggtccagcctgtgctcagcgatggaaaaagccagcctctccgtgctngtgaatgcctccacaggccacctgctggtgcccatcgagactccccatgggcttgggcccnagcgggcnctgaananncctccnctggncanctcacagcttccnggccattcnttttgaaaaccatttgggcnannaaatgcaaanntcgggggcaaaagggaaagcccccctttacagcaatccccagnggaaatgaancccacttnttnttcttaaaccttatanggggnantttttntnnaatgtccccaaggccnccnccntttnggganngggggancnggaaaannnnnaangancnggnancccccccttnaaaaccnaaccnnttgangggnctgttttncncnggggganncnggggaaccccccancngggcntnaaattnaactaagnatnccgggnnnnnnggancncggntnacnntttttttccnttcnnaaaa

SEQ ID NO: 845 - DNA, 1200 bp, Homo Sapiens
  misc_feature (824)..(824): n is a, c, g, or t
  misc_feature (855)..(855): n is a, c, g, or t
  misc_feature (857)..(857): n is a, c, g, or t
  misc_feature (886)..(886): n is a, c, g, or t
  misc_feature (919)..(919): n is a, c, g, or t
  misc_feature (933)..(933): n is a, c, g, or t
  misc_feature (944)..(945): n is a, c, g, or t
  misc_feature (962)..(962): n is a, c, g, or t
  misc_feature (966)..(966): n is a, c, g, or t
  misc_feature (985)..(986): n is a, c, g, or t
  misc_feature (990)..(990): n is a, c, g, or t
  misc_feature (1011)..(1011): n is a, c, g, or t
  misc_feature (1025)..(1025): n is a, c, g, or t
  misc_feature (1027)..(1027): n is a, c, g, or t
  misc_feature (1030)..(1030): n is a, c, g, or t
  misc_feature (1035)..(1035): n is a, c, g, or t
  misc_feature (1037)..(1037): n is a, c, g, or t
  misc_feature (1045)..(1045): n is a, c, g, or t
  misc_feature (1047)..(1047): n is a, c, g, or t
  misc_feature (1054)..(1054): n is a, c, g, or t
  misc_feature (1061)..(1061): n is a, c, g, or t
  misc_feature (1065)..(1065): n is a, c, g, or t
  misc_feature (1071)..(1071): n is a, c, g, or t
  misc_feature (1075)..(1075): n is a, c, g, or t
  misc_feature (1078)..(1078): n is a, c, g, or t
  misc_feature (1084)..(1084): n is a, c, g, or t
  misc_feature (1088)..(1099): n is a, c, g, or t
  misc_feature (1101)..(1115): n is a, c, g, or t
  misc_feature (1119)..(1120): n is a, c, g, or t
  misc_feature (1122)..(1122): n is a, c, g, or t
  misc_feature (1125)..(1125): n is a, c, g, or t
  misc_feature (1135)..(1135): n is a, c, g, or t
  misc_feature (1137)..(1137): n is a, c, g, or t
  misc_feature (1140)..(1142): n is a, c, g, or t
  misc_feature (1144)..(1145): n is a, c, g, or t
  misc_feature (1151)..(1152): n is a, c, g, or t
  misc_feature (1157)..(1157): n is a, c, g, or t
  misc_feature (1159)..(1162): n is a, c, g, or t
  misc_feature (1164)..(1164): n is a, c, g, or t
  misc_feature (1166)..(1167): n is a, c, g, or t
  misc_feature (1169)..(1169): n is a, c, g, or t
  misc_feature (1171)..(1172): n is a, c, g, or t
  misc_feature (1177)..(1177): n is a, c, g, or t
  misc_feature (1179)..(1179): n is a, c, g, or t
  misc_feature (1181)..(1181): n is a, c, g, or t
  misc_feature (1183)..(1183): n is a, c, g, or t
  misc_feature (1191)..(1193): n is a, c, g, or t
  misc_feature (1195)..(1196): n is a, c, g, or t
  misc_feature (1198)..(1199): n is a, c, g, or t
tagagaaattactatgagaggatcgcatcaccatcaccatcacggatcctatttaggtgacactatagaatcgtcgacccacgcgtccgcagcctattcttcctacaaggccgtgaagacaaaaaacgtgaaggaatatgtgaaatggatgatgtactggatcgtctttgccttcttcaccacggccgagacgctcacggatatagtgctctcctggttccccttctactttgaactgaagatcgccttcgtgatatggctgctgtccccttacaccaagggctccagcgtgctctaccgcaagttcgtgcacccaacgctgtccaacaaggagaaggagatcgacgagtacatcacgcaggcccgagacaagagctatgagaccatgatgagggtgggcaagaggggcctgaaccttgccgccaatgctgcagtcacagctgccgccaagggccagggggtgctgtcagagaagctccgcagcttcagcatgcaggacctgaccctgatccgggacgaggacgcactgcccctgcagaggcctgacggccgcctccgacccagccctggcagcctcctggacaccatcgaggacttaggagatgaccctgccctgagtctaaggtccagcacaaacccggcagattcccggacagaggcttctgaggatgacatgggagacaaagctcccaagagggccaaacccatcaaaaaagcgcccaaagctgagccactggcttccaagacactgaagacccggcccaagaagaagacctctggcgggggcgactcagcttgagcccctccacccccgcaggctgcanagcaaggatgaagcctcaggaggggcctcananccagcccctgctccacactgtgccagtancctaggtgtctcaggcccctgggccccgcaaanggccattttccggngcctgccccannggccactcttctggaangggntttggaaaaaaaaaatgcnngaanccgcgggggctccccggttcnttgggaaaaagggngnccntttgnancttttggnantgggaanaaccaanaaanccaaantctnggnccctcnaaannnnnnnnnnnnannnnnnnnnnnnnnngggnngnccncccccctaananggnnncnnattaannttaantnnnntnanntngnnccccngntnanaaaatccnnnanngnnc

SEQ ID NO: 846 - DNA, 1391 bp, Homo Sapiens
  misc_feature (900)..(900): n is a, c, g, or t
  misc_feature (928)..(928): n is a, c, g, or t
  misc_feature (933)..(933): n is a, c, g, or t
  misc_feature (935)..(935): n is a, c, g, or t
  misc_feature (981)..(981): n is a, c, g, or t
  misc_feature (983)..(984): n is a, c, g, or t
  misc_feature (991)..(991): n is a, c, g, or t
  misc_feature (995)..(995): n is a, c, g, or t
  misc_feature (1028)..(1028): n is a, c, g, or t
  misc_feature (1046)..(1046): n is a, c, g, or t
  misc_feature (1053)..(1053): n is a, c, g, or t
  misc_feature (1055)..(1055): n is a, c, g, or t
  misc_feature (1064)..(1064): n is a, c, g, or t
  misc_feature (1068)..(1068): n is a, c, g, or t
  misc_feature (1070)..(1070): n is a, c, g, or t
  misc_feature (1078)..(1078): n is a, c, g, or t
  misc_feature (1080)..(1080): n is a, c, g, or t
  misc_feature (1083)..(1085): n is a, c, g, or t
  misc_feature (1090)..(1090): n is a, c, g, or t
  misc_feature (1112)..(1112): n is a, c, g, or t
  misc_feature (1118)..(1118): n is a, c, g, or t
  misc_feature (1120)..(1120): n is a, c, g, or t
  misc_feature (1122)..(1123): n is a, c, g, or t
  misc_feature (1129)..(1129): n is a, c, g, or t
  misc_feature (1149)..(1149): n is a, c, g, or t
  misc_feature (1158)..(1158): n is a, c, g, or t
  misc_feature (1162)..(1162): n is a, c, g, or t
  misc_feature (1166)..(1166): n is a, c, g, or t
  misc_feature (1178)..(1238): n is a, c, g, or t
  misc_feature (1244)..(1244): n is a, c, g, or t
  misc_feature (1246)..(1246): n is a, c, g, or t
  misc_feature (1249)..(1253): n is a, c, g, or t
  misc_feature (1256)..(1256): n is a, c, g, or t
  misc_feature (1258)..(1259): n is a, c, g, or t
  misc_feature (1261)..(1263): n is a, c, g, or t
  misc_feature (1265)..(1269): n is a, c, g, or t
  misc_feature (1272)..(1273): n is a, c, g, or t
  misc_feature (1280)..(1281): n is a, c, g, or t
  misc_feature (1284)..(1284): n is a, c, g, or t
  misc_feature (1288)..(1288): n is a, c, g, or t
  misc_feature (1291)..(1292): n is a, c, g, or t
  misc_feature (1295)..(1295): n is a, c, g, or t
  misc_feature (1303)..(1303): n is a, c, g, or t
  misc_feature (1306)..(1306): n is a, c, g, or t
  misc_feature (1308)..(1309): n is a, c, g, or t
  misc_feature (1312)..(1312): n is a, c, g, or t
  misc_feature (1314)..(1314): n is a, c, g, or t
  misc_feature (1321)..(1322): n is a, c, g, or t
  misc_feature (1325)..(1325): n is a, c, g, or t
  misc_feature (1327)..(1329): n is a, c, g, or t
  misc_feature (1331)..(1333): n is a, c, g, or t
  misc_feature (1338)..(1343): n is a, c, g, or t
  misc_feature (1345)..(1348): n is a, c, g, or t
  misc_feature (1352)..(1357): n is a, c, g, or t
  misc_feature (1359)..(1360): n is a, c, g, or t
  misc_feature (1365)..(1368): n is a, c, g, or t
  misc_feature (1371)..(1371): n is a, c, g, or t
  misc_feature (1380)..(1380): n is a, c, g, or t
  misc_feature (1382)..(1382): n is a, c, g, or t
  misc_feature (1384)..(1385): n is a, c, g, or t
  misc_feature (1388)..(1389): n is a, c, g, or t
  misc_feature (1391)..(1391): n is a, c, g, or t
agagattactatgagaggatcgcatcaccatcaccatcacggatcctatttaggtgacactatagaatcgtcgacccacgcgtccggtccggcccgcagggcggtcgaggtgggaacggagcagccccgggggcccccttgaggcggcgaggccgcgaagggcgcggggctggagggtaggagagcgcgggaaagcgccccagacgccactcgcggcggacggcggccagttcccaggggtttggagccggcccgcggcgccatggctcacgtcggctcccgcaagcgctcgaggagtcgcagccggtcccggggacgggggtcggaaaagagaaagaagaagagcaggaaagacacctcgaggaactgctcggcctccacatcccaaggtcgcaaggccagcacggcccctggggcggaggagagaagcaagcagaaggcccggaggagaacaagatccagctcctcctcctcttcttccagttcttctagctcctcttcttcctcctcgtcctcctcctcttcctccagtgatggccggaagaagcgggggaagtacaaggacaagaggaggaagaagaagaagaagaggaagaagctgaagaagaagggcaaggagaaggcggaagcacagcaggtggaggctctgccgggcccctcgctggaccagtggcaccgatcagctggggaggaagaggatggcccagtcctgacggatgagcagaagtcccgaatccaggccatgaagcccatgaccaaggaggagtgggatgcccggcagagcatcatccgcaaggtggtggaccctgagacggggcgcaccaggcttattaagggagatggcgaggtcctagaggaaatcgtaaccaaagaacgacacagagagatcaacaagcaagncacccgaggggactgcctggccttccanatgcnanctgggttgctttcctgagggcccccgctggccaaagcctgtggacnannctggcgnccancctgggcaggtttcagggtgccattgggaaacntgatgggtgctggtggcntttcccngngattgtttntggncnacccaatntnttnnnagggnaggggttgaagttgggttcccngccttntngnncccccnttgaaaaaaaacctttttantttttaagncccntggntaaaaaaaaaannnnnnnnnnnnnnnnnnnnnnnnnnnnnnnnnnnnnnnnnnnnnnnnnnnnnnnnnnnnncccccnanggnnnnnaantnntnnnannnnnccnnttaaaannaancccnaannttntttttaanctntnnccngnttttttnnaancnnntnnnttttnnnnnnannnnaaannnnnncnnttttnnnnaanttttttttntnannaanntn

SEQ ID NO: 847 - DNA, 1372 bp, Homo Sapiens
  misc_feature (1)..(1): n is a, c, g, or t
  misc_feature (864)..(864): n is a, c, g, or t
  misc_feature (886)..(886): n is a, c, g, or t
  misc_feature (900)..(900): n is a, c, g, or t
  misc_feature (904)..(904): n is a, c, g, or t
  misc_feature (930)..(930): n is a, c, g, or t
  misc_feature (964)..(965): n is a, c, g, or t
  misc_feature (988)..(988): n is a, c, g, or t
  misc_feature (992)..(993): n is a, c, g, or t
  misc_feature (1032)..(1032): n is a, c, g, or t
  misc_feature (1034)..(1035): n is a, c, g, or t
  misc_feature (1040)..(1040): n is a, c, g, or t
  misc_feature (1052)..(1052): n is a, c, g, or t
  misc_feature (1059)..(1060): n is a, c, g, or t
  misc_feature (1064)..(1064): n is a, c, g, or t
  misc_feature (1083)..(1083): n is a, c, g, or t
  misc_feature (1086)..(1086): n is a, c, g, or t
  misc_feature (1088)..(1088): n is a, c, g, or t
  misc_feature (1092)..(1094): n is a, c, g, or t
  misc_feature (1096)..(1097): n is a, c, g, or t
  misc_feature (1099)..(1100): n is a, c, g, or t
  misc_feature (1102)..(1205): n is a, c, g, or t
  misc_feature (1213)..(1247): n is a, c, g, or t
  misc_feature (1254)..(1259): n is a, c, g, or t
  misc_feature (1261)..(1261): n is a, c, g, or t
  misc_feature (1263)..(1263): n is a, c, g, or t
  misc_feature (1265)..(1272): n is a, c, g, or t
  misc_feature (1280)..(1280): n is a, c, g, or t
  misc_feature (1288)..(1289): n is a, c, g, or t
  misc_feature (1291)..(1291): n is a, c, g, or t
  misc_feature (1297)..(1298): n is a, c, g, or t
  misc_feature (1300)..(1302): n is a, c, g, or t
  misc_feature (1313)..(1313): n is a, c, g, or t
  misc_feature (1316)..(1318): n is a, c, g, or t
  misc_feature (1326)..(1326): n is a, c, g, or t
  misc_feature (1334)..(1334): n is a, c, g, or t
  misc_feature (1342)..(1342): n is a, c, g, or t
  misc_feature (1346)..(1346): n is a, c, g, or t
  misc_feature (1348)..(1348): n is a, c, g, or t
  misc_feature (1354)..(1354): n is a, c, g, or t
  misc_feature (1356)..(1356): n is a, c, g, or t
  misc_feature (1360)..(1360): n is a, c, g, or t
  misc_feature (1364)..(1366): n is a, c, g, or t
naatagagaaattactatgagaggatcgcatcaccatcaccatcacggatcctatttaggtgacactatagaatcgtcgacccacgcgtccggacaggttgaactcattcctaatggtgtaaatataccagtcactccacagaatgtatatgagtatgtgcggaaatacgcagaacacagaatgttggtagttgcagaacagcccttacatgcaatgaggaaaggtctactagatgtgcttccaaaaaattcattagaagatttaacggcagaagattttaggcttttggtaaatggctgcggtgaagtcaatgtgcaaatgctgatcagttttacctctttcaatgatgaatcaggagaaaatgctgagaagcttctgcagttcaagcgttggttctggtcaatagtagagaagatgagcatgacagaacgacaagatcttgtttacttttggacatcaagcccatcactgccagccagtgaagaaggattccagcctatgccctcaatcacaataagaccaccagatgaccaacatcttcctactgcaaatacttgcatttctcgactttacgtcccactctattcctctaaacagattctcaaacagaaattgttactcgccattaagaccaagaattttggttttgtgtagagtataaaaagtgtgtattgctgtgtaatattactagcaaattttgtagatttttttccatttgtctataaaagtttatggaagttaatgctgtcatacccccctggtggtaccttaaagagataaaatgcagacattccttgctgagtttatagcttaaaggcctaaggagcactagcaacatttggctatattgggtttgctagtcnccaacttctgggtctaaccccngccaaaagatgacngcanaaccaccataattttaccctggggantttatcttttttgccgaagggggaaaaaaaatgnnaaatgttcctgaaaaattccccngccnnccttttggggaaaacggtttcccccaaaaggtttctttntnnaaaangggaaaaagggnaattttnnaaanaaaaaattttagttttggnaananaaannnannannannnnnnnnnnnnnnnnnnnnnnnnnnnnnnnnnnnnnnnnnnnnnnnnnnnnnnnnnnnnnnnnnnnnnnnnnnnnnnnnnnnnnnnnnnnnnnnnnnnnnnnncccccccnnnnnnnnnnnnnnnnnnnnnnnnnnnnnnnnnnnccccccnnnnnnanancnnnnnnnncccccccncccccccnntntttttnncnnnccccccccccncgnnntttttttntgagaaancccccccngggngnttttcncnacanaccnnnaaaaaa

SEQ ID NO: 848 - DNA, 1384 bp, Homo Sapiens
  misc_feature (752)..(752): n is a, c, g, or t
  misc_feature (763)..(763): n is a, c, g, or t
  misc_feature (811)..(811): n is a, c, g, or t
  misc_feature (857)..(857): n is a, c, g, or t
  misc_feature (860)..(860): n is a, c, g, or t
  misc_feature (870)..(870): n is a, c, g, or t
  misc_feature (880)..(880): n is a, c, g, or t
  misc_feature (887)..(887): n is a, c, g, or t
  misc_feature (894)..(894): n is a, c, g, or t
  misc_feature (905)..(905): n is a, c, g, or t
  misc_feature (910)..(910): n is a, c, g, or t
  misc_feature (919)..(919): n is a, c, g, or t
  misc_feature (924)..(924): n is a, c, g, or t
  misc_feature (926)..(926): n is a, c, g, or t
  misc_feature (934)..(934): n is a, c, g, or t
  misc_feature (943)..(943): n is a, c, g, or t
  misc_feature (946)..(946): n is a, c, g, or t
  misc_feature (962)..(962): n is a, c, g, or t
  misc_feature (972)..(973): n is a, c, g, or t
  misc_feature (985)..(986): n is a, c, g, or t
  misc_feature (990)..(990): n is a, c, g, or t
  misc_feature (995)..(995): n is a, c, g, or t
  misc_feature (997)..(997): n is a, c, g, or t
  misc_feature (1011)..(1012): n is a, c, g, or t
  misc_feature (1073)..(1074): n is a, c, g, or t
  misc_feature (1102)..(1102): n is a, c, g, or t
  misc_feature (1108)..(1109): n is a, c, g, or t
  misc_feature (1111)..(1111): n is a, c, g, or t
  misc_feature (1114)..(1114): n is a, c, g, or t
  misc_feature (1117)..(1117): n is a, c, g, or t
  misc_feature (1133)..(1133): n is a, c, g, or t
  misc_feature (1139)..(1139): n is a, c, g, or t
  misc_feature (1155)..(1156): n is a, c, g, or t
  misc_feature (1160)..(1160): n is a, c, g, or t
  misc_feature (1163)..(1163): n is a, c, g, or t
  misc_feature (1171)..(1171): n is a, c, g, or t
  misc_feature (1174)..(1174): n is a, c, g, or t
  misc_feature (1180)..(1180): n is a, c, g, or t
  misc_feature (1188)..(1188): n is a, c, g, or t
  misc_feature (1204)..(1204): n is a, c, g, or t
  misc_feature (1210)..(1210): n is a, c, g, or t
  misc_feature (1214)..(1214): n is a, c, g, or t
  misc_feature (1220)..(1220): n is a, c, g, or t
  misc_feature (1222)..(1222): n is a, c, g, or t
  misc_feature (1229)..(1230): n is a, c, g, or t
  misc_feature (1237)..(1237): n is a, c, g, or t
  misc_feature (1242)..(1242): n is a, c, g, or t
  misc_feature (1259)..(1260): n is a, c, g, or t
  misc_feature (1263)..(1263): n is a, c, g, or t
  misc_feature (1269)..(1269): n is a, c, g, or t
  misc_feature (1290)..(1290): n is a, c, g, or t
  misc_feature (1306)..(1306): n is a, c, g, or t
  misc_feature (1320)..(1320): n is a, c, g, or t
  misc_feature (1322)..(1323): n is a, c, g, or t
  misc_feature (1325)..(1326): n is a, c, g, or t
  misc_feature (1329)..(1330): n is a, c, g, or t
  misc_feature (1347)..(1347): n is a, c, g, or t
  misc_feature (1355)..(1356): n is a, c, g, or t
  misc_feature (1361)..(1362): n is a, c, g, or t
  misc_feature (1366)..(1366): n is a, c, g, or t
  misc_feature (1368)..(1368): n is a, c, g, or t
  misc_feature (1382)..(1382): n is a, c, g, or t
tagagaaattactatgagaggatcgcatcaccatcaccatcacggatcctatttaggtgacactatagaatcgtcgacccacgcgtccgcaaagcaggaccttgcttatgaacgtcagtatgaacagcaaacctatcaggtgatccctgaggtgatcaaaaacttcatccagtatttccacaaaactgtctcagatttgattgaccagaaagtgtatgagctacaggccagtcgtgtctccagtgatgtcattgaccagaaggtgtatgagatccaggacatctatgagaacagctggaccaagctgactgaaagattcttcaagaatacaccttggcccgaggctgaagccattgctccacaggttggcaatgatgctgtcttcctgattttatacaaagaattatactacaggcacatatatgccaaagtcagtgggggaccttccttggagcagaggtttgaatcctattacaactactgcaatctcttcaactacattcttaatgccgatggtcctgctccccttgaactacccaaccagtggctctgggatattatcgatgagttcatctaccagtttcagtcattcagtcagtaccgctgtaagactgccaagaagtcagaggaggagattgactttcttcgttccaatcccaaaatctggaatgttcatagtgtcctcaatgtccttcattccctggtagacaaatccaacatcaaccgacagttggaggtatacacaagcggangtgaccctganagtgtggctggggagtatgggcggcactccctctacaaaatgcttggntacttcagcctggtcgggcttctccgcctgcactccctgttagganatnactaccaggnccatcaaggngctgganaacatcnaactgaacaanaaaantatgtattncccgngngccaaagngccaggtcnccncaaaactaattatgtngggttggcannttgaaagaaggnncccnttacnanaaggccatccgggnnttccccaaaaatcctcctttaaattcaaaagaacaaaaaaccatgttcccaaagaaccccnntacagtttggaaaatgattaaacacccnaatggnncnaangcntggccctgctgggccntgcccncccaaaggtacccccnngggnatnggaggaanaantccccncccccggnggaaaaaaaatggggnaaaaantttngccctncnaaagggnncccccanttttnaaaaaattttttttttnnccnccccanttctggccccgggggggcccnaaaaaaaggccccccnacccaaaaaccctncnncnnaannggtttttaaaaaaaaangccttttnnccccnntttnanatcccccggggggngg

SEQ ID NO: 849 - DNA, 1194 bp, Homo Sapiens
  misc_feature (1)..(1): n is a, c, g, or t
  misc_feature (859)..(859): n is a, c, g, or t
  misc_feature (922)..(922): n is a, c, g, or t
  misc_feature (976)..(976): n is a, c, g, or t
  misc_feature (990)..(991): n is a, c, g, or t
  misc_feature (1001)..(1001): n is a, c, g, or t
  misc_feature (1014)..(1014): n is a, c, g, or t
  misc_feature (1020)..(1020): n is a, c, g, or t
  misc_feature (1024)..(1024): n is a, c, g, or t
  misc_feature (1037)..(1037): n is a, c, g, or t
  misc_feature (1049)..(1049): n is a, c, g, or t
  misc_feature (1054)..(1055): n is a, c, g, or t
  misc_feature (1057)..(1057): n is a, c, g, or t
  misc_feature (1064)..(1064): n is a, c, g, or t
  misc_feature (1068)..(1069): n is a, c, g, or t
  misc_feature (1083)..(1084): n is a, c, g, or t
  misc_feature (1094)..(1094): n is a, c, g, or t
  misc_feature (1097)..(1097): n is a, c, g, or t
  misc_feature (1104)..(1104): n is a, c, g, or t
  misc_feature (1112)..(1112): n is a, c, g, or t
  misc_feature (1116)..(1116): n is a, c, g, or t
  misc_feature (1123)..(1123): n is a, c, g, or t
  misc_feature (1128)..(1129): n is a, c, g, or t
  misc_feature (1136)..(1136): n is a, c, g, or t
  misc_feature (1139)..(1139): n is a, c, g, or t
  misc_feature (1141)..(1141): n is a, c, g, or t
  misc_feature (1144)..(1145): n is a, c, g, or t
  misc_feature (1151)..(1152): n is a, c, g, or t
  misc_feature (1155)..(1155): n is a, c, g, or t
  misc_feature (1158)..(1158): n is a, c, g, or t
  misc_feature (1168)..(1172): n is a, c, g, or t
  misc_feature (1174)..(1174): n is a, c, g, or t
  misc_feature (1176)..(1177): n is a, c, g, or t
  misc_feature (1179)..(1179): n is a, c, g, or t
  misc_feature (1181)..(1181): n is a, c, g, or t
  misc_feature (1184)..(1185): n is a, c, g, or t
naatagagaaattactatggagaggatcgcatcaccatcaccatcacggatcctatttaggtgacactatagaatcgtcgacccacgcgtccgcccacgcgtccgcccacgcgtccgcactgtcaaaactttacaagttaattgaagagtcttgtccacagctggcaaattcagtgcagatcagaatcaaactgatggctgaaggcgagttgaaggatatggaacagttttttgatgacctttcagattctttctctggaactgaaccagaggttcacaaaacaagtgtagtaggtttgtttctgcgtcacatgatcttggcctacagtaagctttctttcagccaagtgtttaaactgtacactgcccttcagcagtacttccagaatggtgagaaaaagacagtggaggatgctgatatggaactgaccagtagagatgagggtgaaagaaaaatggaaaaagaagaacttgatgtatctgtaagagaagaggaggtatcttgcagtgggcctctgtcccaaaaacaagcagaattttttctttctcaacaggcttctttgctaaagaatgatgagactaaggccctcactccagcttccttgcagaaggaattaaacaatttgttgaaatttaatcctgattttgctgaagcgcattatctcagctacttaaacaacctccgtgtccaagatgttttcagttcaacacacagtctcctccattattttgatcgtctgattcttaccggagccgaaagcaaaagtaatggggaagagggctatggccggagcttgagatacgccgctctgaatcttgccgccctgcactgcccgcttcggtcactatcaacaggcanagctcgcccctgcaggaggcaattaggattgcccaggaagtccaacgatcacgtgtgtctccnggcactgttttgagctggctttatgtgctggggccaaaaaaaatccgatagctntgttcctgctgganncattctgggnaaaaaggcagtanattttngggnttaccgtaccccnccccccctgggnaaaanngnccccttnttcnnaaaaaaacttttgnnggggaaaaanggnaaaaaanctgaaggnatgnccctaanggacnnccaaccnccngnccnnggaaannaanccnggtcaaaacnnnnncnanntncnccnncccccaaaa

SEQ ID NO: 850 - DNA, 1327 bp, Homo Sapiens
  misc_feature (3)..(3): n is a, c, g, or t
  misc_feature (961)..(961): n is a, c, g, or t
  misc_feature (967)..(967): n is a, c, g, or t
  misc_feature (970)..(970): n is a, c, g, or t
  misc_feature (975)..(976): n is a, c, g, or t
  misc_feature (986)..(986): n is a, c, g, or t
  misc_feature (995)..(995): n is a, c, g, or t
  misc_feature (1001)..(1001): n is a, c, g, or t
  misc_feature (1053)..(1053): n is a, c, g, or t
  misc_feature (1100)..(1100): n is a, c, g, or t
  misc_feature (1104)..(1104): n is a, c, g, or t
  misc_feature (1109)..(1109): n is a, c, g, or t
  misc_feature (1115)..(1115): n is a, c, g, or t
  misc_feature (1141)..(1141): n is a, c, g, or t
  misc_feature (1152)..(1152): n is a, c, g, or t
  misc_feature (1166)..(1166): n is a, c, g, or t
  misc_feature (1169)..(1169): n is a, c, g, or t
  misc_feature (1172)..(1172): n is a, c, g, or t
  misc_feature (1176)..(1176): n is a, c, g, or t
  misc_feature (1180)..(1180): n is a, c, g, or t
  misc_feature (1187)..(1187): n is a, c, g, or t
  misc_feature (1191)..(1191): n is a, c, g, or t
  misc_feature (1196)..(1196): n is a, c, g, or t
  misc_feature (1200)..(1201): n is a, c, g, or t
  misc_feature (1205)..(1205): n is a, c, g, or t
  misc_feature (1207)..(1207): n is a, c, g, or t
  misc_feature (1212)..(1212): n is a, c, g, or t
  misc_feature (1215)..(1215): n is a, c, g, or t
  misc_feature (1218)..(1218): n is a, c, g, or t
  misc_feature (1220)..(1220): n is a, c, g, or t
  misc_feature (1230)..(1231): n is a, c, g, or t
  misc_feature (1235)..(1235): n is a, c, g, or t
  misc_feature (1241)..(1241): n is a, c, g, or t
  misc_feature (1244)..(1244): n is a, c, g, or t
  misc_feature (1247)..(1247): n is a, c, g, or t
  misc_feature (1259)..(1259): n is a, c, g, or t
  misc_feature (1264)..(1264): n is a, c, g, or t
  misc_feature (1267)..(1268): n is a, c, g, or t
  misc_feature (1273)..(1273): n is a, c, g, or t
  misc_feature (1275)..(1276): n is a, c, g, or t
  misc_feature (1283)..(1283): n is a, c, g, or t
  misc_feature (1285)..(1286): n is a, c, g, or t
  misc_feature (1292)..(1292): n is a, c, g, or t
  misc_feature (1296)..(1296): n is a, c, g, or t
  misc_feature (1299)..(1299): n is a, c, g, or t
cantagagaaattactatgagaggatcgcatcaccatcaccatcacggatcctatttaggtgacactatagaatcgtcgacccacgcgtccgaccagcagcagcgtcaggaatctctagaaagaagaacctcggccacagggcccatcctcccaccaggacatccttcatctgcagccagcgcccccgtctcatgtagtgggcctccaccgccccccccacccccagtcccacctccacccactggggctaccccacctcccccacccccactgccagccggaggagcccaggggtccagccacgacgagagctccatgtcaggactggccgctgccatagctggggccaagctgagaagagtccaacggccagaagacgcatctggaggctccagtcccagtgggacctcaaagtccgatgccaaccgggcaagcagcgggggtggcggaggaggcctcatggaggaaatgaacaaactgctggccaagaggagaaaagcagcctcccagtcagacaagccagccgagaagaaggaagatgaaagccaaatggaagatcctagtacctccccctctccggggacccgagcagccagccagccacctaactcctcagaggctggccggaagccctgggagcggagcaactcggtggagaagcctgtgtcctcgattctgtccagaaccccgtctgtggcaaagagccccgaagctaagagcccccttcagtcgcagcctcactctaggatgaagcctgctgggagcgtgaatgacatggccctggatgccttcgacttggaccggatgaagcaggagatcctagaggaggtggtgagagagctccacaaggtgaaggaggagatcatcgacgccatcaggcaggagctgagtgggatcagcaccacgtaaggggccggcctcgctgcgctgattcgtcgagcccatccggcgacagagganagccanaanccagnnagccccaaanttccagtgnacaaancacgcacagaacctgggcgcgctgctgtgaaacgtcctgacctgtgatccantgacagtgagaaacaagtgcactctggttttttaaatttgctgaaangaanacagncgcccnctttttggtttaattgctataagganttttttggttnaaaacccctaatcntgnttntaangttncggtttncccngggantttnncctnanggggnaancgncngggggccccnnaccnaaattnagnaantcctcccccctnggttnaannttttncnnggttttncnnaaaaantttntcnaaaaaaaaaaaaaaaaaaaaaaaagggc

SEQ ID NO: 851 - DNA, 1376 bp, Homo Sapiens
  misc_feature (706)..(706): n is a, c, g, or t
  misc_feature (801)..(801): n is a, c, g, or t
  misc_feature (874)..(874): n is a, c, g, or t
  misc_feature (887)..(887): n is a, c, g, or t
  misc_feature (904)..(905): n is a, c, g, or t
  misc_feature (923)..(923): n is a, c, g, or t
  misc_feature (938)..(938): n is a, c, g, or t
  misc_feature (951)..(951): n is a, c, g, or t
  misc_feature (954)..(954): n is a, c, g, or t
  misc_feature (967)..(967): n is a, c, g, or t
  misc_feature (976)..(976): n is a, c, g, or t
  misc_feature (996)..(997): n is a, c, g, or t
  misc_feature (999)..(999): n is a, c, g, or t
  misc_feature (1006)..(1006): n is a, c, g, or t
  misc_feature (1023)..(1023): n is a, c, g, or t
  misc_feature (1037)..(1037): n is a, c, g, or t
  misc_feature (1039)..(1039): n is a, c, g, or t
  misc_feature (1054)..(1054): n is a, c, g, or t
  misc_feature (1056)..(1056): n is a, c, g, or t
  misc_feature (1065)..(1065): n is a, c, g, or t
  misc_feature (1071)..(1071): n is a, c, g, or t
  misc_feature (1074)..(1075): n is a, c, g, or t
  misc_feature (1092)..(1092): n is a, c, g, or t
  misc_feature (1100)..(1100): n is a, c, g, or t
  misc_feature (1105)..(1105): n is a, c, g, or t
  misc_feature (1111)..(1111): n is a, c, g, or t
  misc_feature (1118)..(1118): n is a, c, g, or t
  misc_feature (1122)..(1122): n is a, c, g, or t
  misc_feature (1128)..(1128): n is a, c, g, or t
  misc_feature (1139)..(1139): n is a, c, g, or t
  misc_feature (1145)..(1145): n is a, c, g, or t
  misc_feature (1151)..(1152): n is a, c, g, or t
  misc_feature (1154)..(1154): n is a, c, g, or t
  misc_feature (1156)..(1156): n is a, c, g, or t
  misc_feature (1158)..(1158): n is a, c, g, or t
  misc_feature (1160)..(1160): n is a, c, g, or t
  misc_feature (1167)..(1168): n is a, c, g, or t
  misc_feature (1172)..(1172): n is a, c, g, or t
  misc_feature (1177)..(1178): n is a, c, g, or t
  misc_feature (1182)..(1182): n is a, c, g, or t
  misc_feature (1192)..(1194): n is a, c, g, or t
  misc_feature (1196)..(1196): n is a, c, g, or t
  misc_feature (1198)..(1198): n is a, c, g, or t
  misc_feature (1201)..(1201): n is a, c, g, or t
  misc_feature (1203)..(1205): n is a, c, g, or t
  misc_feature (1211)..(1211): n is a, c, g, or t
  misc_feature (1214)..(1214): n is a, c, g, or t
  misc_feature (1216)..(1216): n is a, c, g, or t
  misc_feature (1220)..(1220): n is a, c, g, or t
  misc_feature (1230)..(1230): n is a, c, g, or t
  misc_feature (1232)..(1234): n is a, c, g, or t
  misc_feature (1239)..(1241): n is a, c, g, or t
  misc_feature (1243)..(1243): n is a, c, g, or t
  misc_feature (1246)..(1246): n is a, c, g, or t
  misc_feature (1252)..(1253): n is a, c, g, or t
  misc_feature (1256)..(1256): n is a, c, g, or t
  misc_feature (1262)..(1262): n is a, c, g, or t
  misc_feature (1265)..(1265): n is a, c, g, or t
  misc_feature (1273)..(1273): n is a, c, g, or t
  misc_feature (1276)..(1277): n is a, c, g, or t
  misc_feature (1279)..(1279): n is a, c, g, or t
  misc_feature (1291)..(1291): n is a, c, g, or t
  misc_feature (1295)..(1295): n is a, c, g, or t
  misc_feature (1297)..(1298): n is a, c, g, or t
  misc_feature (1300)..(1300): n is a, c, g, or t
  misc_feature (1308)..(1308): n is a, c, g, or t
  misc_feature (1320)..(1320): n is a, c, g, or t
  misc_feature (1328)..(1329): n is a, c, g, or t
  misc_feature (1339)..(1339): n is a, c, g, or t
  misc_feature (1350)..(1350): n is a, c, g, or t
  misc_feature (1352)..(1353): n is a, c, g, or t
  misc_feature (1356)..(1356): n is a, c, g, or t
  misc_feature (1358)..(1358): n is a, c, g, or t
  misc_feature (1360)..(1361): n is a, c, g, or t
  misc_feature (1365)..(1365): n is a, c, g, or t
  misc_feature (1369)..(1370): n is a, c, g, or t
  misc_feature (1372)..(1372): n is a, c, g, or t
  misc_feature (1376)..(1376): n is a, c, g, or t
atagagagattactatgagaggatcgcatcaccatcaccatcacggatcctatttaggtgacactatagaatcgtcgacccacgcgtccgctctgagaagccggactacgcggcagcggctcttcaaagcggagccgggagtttttgctacagttttcgccaccatgagtcgcagctataatgatgagctgcagttcttggagaagatcaataaaaactgctggaggatcaagaagggcttcgtgcccaacatgcaggttgaaggtgttttctatgtgaatgatgctctggagaaattgatgtttgaggaattaaggaatgcctgtcgaggtggtggtgttggtggcttcctgccagccatgaaacagattggcaatgtggcagccctgcctggaattgttcatcgatctattgggcttcctgatgtccattcaggatatgggtttgctattgggaacatggcagcctttgatatgaatgaccctgaagcagtagtatccccaggtggtgtcgggtttgacatcaactgtggtgtccgcttgctaagaaccaatttagatgaaagtgatgtccagcctgtgaaggagcaacttgcccaagctatgtttgaccacattcctgttggggtggggtcaaaaggtgtcatcccaatgaatgccaaagacttggaggaggccttggagatgggggtggactggtccttaanagaagggtatgcctgggctgaagacaaggagcactgcgaggagtacggaaggatgctgcaagctgaccccaaataaagtttctgcaagggcgaanaaaaagaggccttcctcagttggggaccctgggagcaggcaaccattatgcagaaatccaggttgtggatganattttcaaatgantatgctgctaaaaaaanngggcatcgaccataaggnacaggtgtgtgtgangaatccacagtgnaancaaaagcttgggnccccccaantaacccccaaatgccccggnnanctattgnaaaaggccctgaaaaanaaaacaaaaattanantccaatgaatccgcnanttggctttngccccnaanncccttcccccaaagggnccaaaacnacctnaaaggnaatggcncccncctggnaacaaatcccngggtcnaacccnncntncncnaaacttnntaancccgnnaggntttccccaannntntnaanannncccccnaananttgncccccacacngnnnactannnanttntccccnnaanttcccnaanggaaacanccnntngtggaaaaaaanaaancnncncctttttncccggaaaggancccccgcnnttttcccccnccaaccccctntnnggntnanncaanccgnnancccn

SEQ ID NO: 852 - DNA, 1200 bp, Homo Sapiens
  misc_feature (2)..(2): n is a, c, g, or t
  misc_feature (4)..(4): n is a, c, g, or t
  misc_feature (28)..(28): n is a, c, g, or t
  misc_feature (39)..(39): n is a, c, g, or t
  misc_feature (42)..(42): n is a, c, g, or t
  misc_feature (52)..(52): n is a, c, g, or t
  misc_feature (58)..(58): n is a, c, g, or t
  misc_feature (62)..(62): n is a, c, g, or t
  misc_feature (65)..(65): n is a, c, g, or t
  misc_feature (101)..(101): n is a, c, g, or t
  misc_feature (106)..(106): n is a, c, g, or t
  misc_feature (124)..(124): n is a, c, g, or t
  misc_feature (131)..(131): n is a, c, g, or t
  misc_feature (134)..(134): n is a, c, g, or t
  misc_feature (139)..(139): n is a, c, g, or t
  misc_feature (141)..(141): n is a, c, g, or t
  misc_feature (143)..(143): n is a, c, g, or t
  misc_feature (150)..(150): n is a, c, g, or t
  misc_feature (186)..(186): n is a, c, g, or t
  misc_feature (197)..(197): n is a, c, g, or t
  misc_feature (202)..(202): n is a, c, g, or t
  misc_feature (207)..(207): n is a, c, g, or t
  misc_feature (211)..(211): n is a, c, g, or t
  misc_feature (215)..(215): n is a, c, g, or t
  misc_feature (217)..(217): n is a, c, g, or t
  misc_feature (221)..(221): n is a, c, g, or t
  misc_feature (228)..(228): n is a, c, g, or t
  misc_feature (230)..(230): n is a, c, g, or t
  misc_feature (257)..(257): n is a, c, g, or t
  misc_feature (276)..(276): n is a, c, g, or t
  misc_feature (291)..(291): n is a, c, g, or t
  misc_feature (315)..(315): n is a, c, g, or t
  misc_feature (331)..(331): n is a, c, g, or t
  misc_feature (335)..(335): n is a, c, g, or t
  misc_feature (341)..(341): n is a, c, g, or t
  misc_feature (344)..(345): n is a, c, g, or t
  misc_feature (349)..(349): n is a, c, g, or t
  misc_feature (354)..(354): n is a, c, g, or t
  misc_feature (360)..(360): n is a, c, g, or t
  misc_feature (362)..(362): n is a, c, g, or t
  misc_feature (368)..(368): n is a, c, g, or t
  misc_feature (373)..(373): n is a, c, g, or t
  misc_feature (379)..(380): n is a, c, g, or t
  misc_feature (384)..(384): n is a, c, g, or t
  misc_feature (395)..(395): n is a, c, g, or t
  misc_feature (403)..(403): n is a, c, g, or t
  misc_feature (406)..(406): n is a, c, g, or t
  misc_feature (408)..(408): n is a, c, g, or t
  misc_feature (410)..(410): n is a, c, g, or t
  misc_feature (416)..(416): n is a, c, g, or t
  misc_feature (418)..(419): n is a, c, g, or t
  misc_feature (428)..(428): n is a, c, g, or t
  misc_feature (435)..(435): n is a, c, g, or t
  misc_feature (439)..(439): n is a, c, g, or t
  misc_feature (451)..(451): n is a, c, g, or t
  misc_feature (459)..(459): n is a, c, g, or t
  misc_feature (468)..(468): n is a, c, g, or t
  misc_feature (471)..(471): n is a, c, g, or t
  misc_feature (477)..(477): n is a, c, g, or t
  misc_feature (481)..(482): n is a, c, g, or t
  misc_feature (500)..(500): n is a, c, g, or t
  misc_feature (517)..(517): n is a, c, g, or t
  misc_feature (521)..(522): n is a, c, g, or t
  misc_feature (529)..(531): n is a, c, g, or t
  misc_feature (535)..(535): n is a, c, g, or t
  misc_feature (543)..(543): n is a, c, g, or t
  misc_feature (547)..(547): n is a, c, g, or t
  misc_feature (569)..(569): n is a, c, g, or t
  misc_feature (576)..(576): n is a, c, g, or t
  misc_feature (584)..(584): n is a, c, g, or t
  misc_feature (592)..(592): n is a, c, g, or t
  misc_feature (636)..(636): n is a, c, g, or t
  misc_feature (643)..(644): n is a, c, g, or t
  misc_feature (648)..(648): n is a, c, g, or t
  misc_feature (655)..(655): n is a, c, g, or t
  misc_feature (660)..(660): n is a, c, g, or t
  misc_feature (663)..(663): n is a, c, g, or t
  misc_feature (668)..(668): n is a, c, g, or t
  misc_feature (674)..(674): n is a, c, g, or t
  misc_feature (682)..(682): n is a, c, g, or t
  misc_feature (692)..(694): n is a, c, g, or t
  misc_feature (698)..(698): n is a, c, g, or t
  misc_feature (705)..(706): n is a, c, g, or t
  misc_feature (708)..(708): n is a, c, g, or t
  misc_feature (710)..(710): n is a, c, g, or t
  misc_feature (716)..(718): n is a, c, g, or t
  misc_feature (724)..(724): n is a, c, g, or t
  misc_feature (732)..(732): n is a, c, g, or t
  misc_feature (734)..(735): n is a, c, g, or t
  misc_feature (738)..(738): n is a, c, g, or t
  misc_feature (741)..(741): n is a, c, g, or t
  misc_feature (744)..(744): n is a, c, g, or t
  misc_feature (753)..(753): n is a, c, g, or t
  misc_feature (755)..(755): n is a, c, g, or t
  misc_feature (760)..(760): n is a, c, g, or t
  misc_feature (762)..(762): n is a, c, g, or t
  misc_feature (765)..(765): n is a, c, g, or t
  misc_feature (773)..(774): n is a, c, g, or t
  misc_feature (780)..(780): n is a, c, g, or t
  misc_feature (787)..(787): n is a, c, g, or t
  misc_feature (789)..(790): n is a, c, g, or t
  misc_feature (794)..(794): n is a, c, g, or t
  misc_feature (798)..(798): n is a, c, g, or t
  misc_feature (800)..(801): n is a, c, g, or t
  misc_feature (804)..(804): n is a, c, g, or t
  misc_feature (809)..(810): n is a, c, g, or t
  misc_feature (815)..(815): n is a, c, g, or t
  misc_feature (827)..(827): n is a, c, g, or t
  misc_feature (830)..(830): n is a, c, g, or t
  misc_feature (836)..(836): n is a, c, g, or t
  misc_feature (838)..(838): n is a, c, g, or t
  misc_feature (842)..(842): n is a, c, g, or t
  misc_feature (844)..(844): n is a, c, g, or t
  misc_feature (846)..(848): n is a, c, g, or t
  misc_feature (853)..(853): n is a, c, g, or t
  misc_feature (855)..(855): n is a, c, g, or t
  misc_feature (857)..(857): n is a, c, g, or t
  misc_feature (859)..(860): n is a, c, g, or t
  misc_feature (863)..(864): n is a, c, g, or t
  misc_feature (867)..(867): n is a, c, g, or t
  misc_feature (877)..(877): n is a, c, g, or t
  misc_feature (882)..(882): n is a, c, g, or t
  misc_feature (887)..(888): n is a, c, g, or t
  misc_feature (892)..(892): n is a, c, g, or t
  misc_feature (901)..(902): n is a, c, g, or t
  misc_feature (917)..(917): n is a, c, g, or t
  misc_feature (924)..(924): n is a, c, g, or t
  misc_feature (926)..(926): n is a, c, g, or t
  misc_feature (931)..(931): n is a, c, g, or t
  misc_feature (933)..(933): n is a, c, g, or t
  misc_feature (935)..(935): n is a, c, g, or t
  misc_feature (943)..(944): n is a, c, g, or t
  misc_feature (950)..(951): n is a, c, g, or t
  misc_feature (955)..(955): n is a, c, g, or t
  misc_feature (959)..(959): n is a, c, g, or t
  misc_feature (962)..(962): n is a, c, g, or t
  misc_feature (967)..(967): n is a, c, g, or t
  misc_feature (976)..(976): n is a, c, g, or t
  misc_feature (979)..(981): n is a, c, g, or t
  misc_feature (997)..(997): n is a, c, g, or t
  misc_feature (1000)..(1000): n is a, c, g, or t
  misc_feature (1005)..(1008): n is a, c, g, or t
  misc_feature (1010)..(1010): n is a, c, g, or t
  misc_feature (1015)..(1016): n is a, c, g, or t
  misc_feature (1019)..(1019): n is a, c, g, or t
  misc_feature (1021)..(1021): n is a, c, g, or t
  misc_feature (1023)..(1023): n is a, c, g, or t
  misc_feature (1027)..(1027): n is a, c, g, or t
  misc_feature (1031)..(1031): n is a, c, g, or t
  misc_feature (1033)..(1033): n is a, c, g, or t
  misc_feature (1036)..(1036): n is a, c, g, or t
  misc_feature (1038)..(1038): n is a, c, g, or t
  misc_feature (1040)..(1040): n is a, c, g, or t
  misc_feature (1044)..(1044): n is a, c, g, or t
  misc_feature (1049)..(1049): n is a, c, g, or t
  misc_feature (1053)..(1053): n is a, c, g, or t
  misc_feature (1062)..(1062): n is a, c, g, or t
  misc_feature (1071)..(1071): n is a, c, g, or t
  misc_feature (1079)..(1079): n is a, c, g, or t
  misc_feature (1089)..(1089): n is a, c, g, or t
  misc_feature (1092)..(1095): n is a, c, g, or t
  misc_feature (1098)..(1098): n is a, c, g, or t
  misc_feature (1101)..(1101): n is a, c, g, or t
  misc_feature (1103)..(1103): n is a, c, g, or t
  misc_feature (1107)..(1107): n is a, c, g, or t
  misc_feature (1111)..(1112): n is a, c, g, or t
  misc_feature (1118)..(1118): n is a, c, g, or t
  misc_feature (1121)..(1121): n is a, c, g, or t
  misc_feature (1127)..(1128): n is a, c, g, or t
  misc_feature (1130)..(1131): n is a, c, g, or t
  misc_feature (1137)..(1137): n is a, c, g, or t
  misc_feature (1143)..(1143): n is a, c, g, or t
  misc_feature (1150)..(1150): n is a, c, g, or t
  misc_feature (1153)..(1153): n is a, c, g, or t
  misc_feature (1160)..(1162): n is a, c, g, or t
  misc_feature (1168)..(1168): n is a, c, g, or t
  misc_feature (1171)..(1171): n is a, c, g, or t
  misc_feature (1173)..(1175): n is a, c, g, or t
  misc_feature (1180)..(1180): n is a, c, g, or t
  misc_feature (1184)..(1184): n is a, c, g, or t
  misc_feature (1187)..(1191): n is a, c, g, or t
  misc_feature (1196)..(1197): n is a, c, g, or t
ananagagaaaaattactatgagagggntcgcctcaccntcnccatcgcggnatcctntttnggntgacactatagaatcgtcgaacccacgcgtccgggntatantgactggatcttgatgangatgatnacnggaangntngcgaaantatagtatggtacccgccttgggctcggattgggantgaagctgganccacnagctnaggnccangngaanggtcagngntacccgggcacgtcgggctgtccaganacggtgcttcccccaattnagatgataccgtttngtcccctcaagagctacaaaaggntctttgcttggttganatgnctgagnagnnttanattcntgaagncngctttnattgntctggnnaacnatgctgcttangcatttancanananattatncnngatctgggnggtctcncggntgtcgcaaagantctcactnctcggtatnccntacttnaggnnaaggctttaattgtcctnaataacttgagtgtgantgcnnaaaatcnnngcangcttcaantatncatgaatcaaatgggtgatganacaatcncttcgtcncttgaaancacctgtgcagcttgctgcgactgaaattgcttacaaatatgantgttacnnatgnttatcancacangcntgcanaattcnattttctnacttttttcnnncatntttccgnngngnaaatgnnnaaaccngacttcangnntcnganacnccctttttnanttctngntgnacaatccnncccatnttttatngnnactngctncnngcnccggnntaccngccttcacttgnggnttcccncntttnantnnnaaagnangnannaanncangtttattacntaatnctttnngggnctatttgannaaccaaacactgtanaattttnanatggngnancaaaaatnnaacctnnttcnaaanccnctttngtcgaaagnttnnnttttttatccttttanaanaattnnnngngggannggntnanaaangttncnggnantnacangaaancacnttctttttntggggcaantttaaaanttgtgaaaanttnnnnggnctnancttntccnnaaaatntcntccccnnannaaccancacatntcacccnttntttttcnnnatttanaanannncctgnattngtnnnnncttcnnttt

SEQ ID NO: 853 - DNA, 1200 bp, Homo Sapiens
  misc_feature (1)..(1): n is a, c, g, or t
  misc_feature (10)..(10): n is a, c, g, or t
  misc_feature (881)..(881): n is a, c, g, or t
  misc_feature (911)..(911): n is a, c, g, or t
  misc_feature (948)..(948): n is a, c, g, or t
  misc_feature (966)..(966): n is a, c, g, or t
  misc_feature (968)..(968): n is a, c, g, or t
  misc_feature (980)..(980): n is a, c, g, or t
  misc_feature (1053)..(1053): n is a, c, g, or t
  misc_feature (1064)..(1064): n is a, c, g, or t
  misc_feature (1075)..(1075): n is a, c, g, or t
  misc_feature (1079)..(1079): n is a, c, g, or t
  misc_feature (1083)..(1083): n is a, c, g, or t
  misc_feature (1103)..(1103): n is a, c, g, or t
  misc_feature (1107)..(1107): n is a, c, g, or t
  misc_feature (1111)..(1111): n is a, c, g, or t
  misc_feature (1113)..(1113): n is a, c, g, or t
  misc_feature (1120)..(1121): n is a, c, g, or t
  misc_feature (1125)..(1125): n is a, c, g, or t
  misc_feature (1128)..(1128): n is a, c, g, or t
  misc_feature (1130)..(1131): n is a, c, g, or t
  misc_feature (1136)..(1136): n is a, c, g, or t
  misc_feature (1138)..(1138): n is a, c, g, or t
  misc_feature (1151)..(1151): n is a, c, g, or t
  misc_feature (1157)..(1157): n is a, c, g, or t
  misc_feature (1165)..(1165): n is a, c, g, or t
  misc_feature (1188)..(1188): n is a, c, g, or t
  misc_feature (1195)..(1195): n is a, c, g, or t
  misc_feature (1199)..(1199): n is a, c, g, or t
naattagagngattactatgagaggatcgcatcaccatcaccatcacggatcctatttaggtgacactatagaatcgtcgacccacgcgtccgaagcccgtaaagagatgactagaaaggctattaagacagtcaaacattttattgagaagccaaggaaaagaaactcagaagacgaagctcaagaagctaaggattctaaagttacctatgcagatactttgaatcatctggagaaatcacttgcccacctggaaaccctgagccacagcttcatcctttctctgaagaatagtgagcaggaaacactgcaaaaatacagtcacctctatgatctgtcccgatcagaaaaagagaaacttcatgatgaagctgtggctatttgtttagatggtcagcctctagcaatgattcagcagctgctagaggtggcagttggccctcttgacatctcacccaaggatatagtgcagagtgcaatcatgaaaataatttctgcattgagtggtggcagtgctgaccttggtgggccaagggacccactgaaggtcctggaaggtgttgttgcagcagtccacgccagtgtggacaagggtgaggagctggtttcacctgaggacctgctggagtggctgcggcctttctgtgctgatgacgcctggccggtgcggccccgcattcacgtgctgcagattttggggcaatcatttcacctgactgaggaggacagcaagctcctcgtgttctttagaactgaagccattctcaaagcctcctggccccagagacaggtagacatagctgacattgagaatgaagagaaccgctactgtctattcatggaactcctggaatctagtcaccacgaggctgaatttcancacttggttttacttttgcaagcttggccncctatgaaaagtgaatatgtcataaaccaataatccntgggtgagactagctacngngatgctaaccanatgtacgatggaaaacaaggaaggattgggggaatgaatttttgaaaaatggtgtcccctctttgtaataacncccaaccaaangcctgcctgcnaaangggnggaaaggaacttgtgtctgnctgncggntnaaccagnncccnccngnnttccntnttggaaaattttncccccnaaaacccnaaaaaaaccctccgccccaaaanggccctngaanc

SEQ ID NO: 854 - DNA, 1283 bp, Homo Sapiens
  misc_feature (3)..(3): n is a, c, g, or t
  misc_feature (814)..(814): n is a, c, g, or t
  misc_feature (823)..(823): n is a, c, g, or t
  misc_feature (876)..(876): n is a, c, g, or t
  misc_feature (894)..(894): n is a, c, g, or t
  misc_feature (900)..(900): n is a, c, g, or t
  misc_feature (913)..(913): n is a, c, g, or t
  misc_feature (933)..(933): n is a, c, g, or t
  misc_feature (942)..(942): n is a, c, g, or t
  misc_feature (950)..(950): n is a, c, g, or t
  misc_feature (953)..(954): n is a, c, g, or t
  misc_feature (959)..(959): n is a, c, g, or t
  misc_feature (978)..(978): n is a, c, g, or t
  misc_feature (986)..(986): n is a, c, g, or t
  misc_feature (989)..(989): n is a, c, g, or t
  misc_feature (996)..(996): n is a, c, g, or t
  misc_feature (999)..(999): n is a, c, g, or t
  misc_feature (1014)..(1014): n is a, c, g, or t
  misc_feature (1018)..(1018): n is a, c, g, or t
  misc_feature (1021)..(1021): n is a, c, g, or t
  misc_feature (1031)..(1031): n is a, c, g, or t
  misc_feature (1033)..(1033): n is a, c, g, or t
  misc_feature (1045)..(1045): n is a, c, g, or t
  misc_feature (1047)..(1047): n is a, c, g, or t
  misc_feature (1050)..(1051): n is a, c, g, or t
  misc_feature (1058)..(1058): n is a, c, g, or t
  misc_feature (1063)..(1063): n is a, c, g, or t
  misc_feature (1067)..(1067): n is a, c, g, or t
  misc_feature (1070)..(1070): n is a, c, g, or t
  misc_feature (1072)..(1072): n is a, c, g, or t
  misc_feature (1094)..(1094): n is a, c, g, or t
  misc_feature (1100)..(1100): n is a, c, g, or t
  misc_feature (1104)..(1106): n is a, c, g, or t
  misc_feature (1132)..(1132): n is a, c, g, or t
  misc_feature (1136)..(1136): n is a, c, g, or t
  misc_feature (1142)..(1142): n is a, c, g, or t
  misc_feature (1144)..(1144): n is a, c, g, or t
  misc_feature (1156)..(1156): n is a, c, g, or t
  misc_feature (1162)..(1163): n is a, c, g, or t
  misc_feature (1166)..(1167): n is a, c, g, or t
  misc_feature (1170)..(1170): n is a, c, g, or t
  misc_feature (1172)..(1172): n is a, c, g, or t
  misc_feature (1177)..(1177): n is a, c, g, or t
  misc_feature (1193)..(1193): n is a, c, g, or t
  misc_feature (1201)..(1201): n is a, c, g, or t
  misc_feature (1203)..(1205): n is a, c, g, or t
  misc_feature (1208)..(1208): n is a, c, g, or t
  misc_feature (1210)..(1210): n is a, c, g, or t
  misc_feature (1219)..(1219): n is a, c, g, or t
  misc_feature (1222)..(1222): n is a, c, g, or t
  misc_feature (1225)..(1225): n is a, c, g, or t
  misc_feature (1232)..(1232): n is a, c, g, or t
  misc_feature (1254)..(1255): n is a, c, g, or t
  misc_feature (1266)..(1266): n is a, c, g, or t
  misc_feature (1269)..(1269): n is a, c, g, or t
  misc_feature (1279)..(1279): n is a, c, g, or t
  misc_feature (1283)..(1283): n is a, c, g, or t
ttngaggaaaattactttgagagggatgcatcaccatcaccatcacggatcctatttaggtgacactatagaatcgtcgacccacgcgtccgagatcctgggagaaccccagccgagcccagcctagcccgagcccagcccgagcggagccggagccccaagcccgagccgcgcccagcccgagcagagccctccagccgctcaccccgcgtgccaccccagcgaccctcagccgctctctgcccttctctcggccccgcgcccgccctcgcggcccctctgcccaatgaaactggccgcgatgatcaagaagatgtgcccgagcgactcggagctgagtatcccggccaagaactgctatcgcatggtcatcctcggctcgtccaaggtgggcaagacggccatcgtgtcgcgcttcctcaccggctgcttcgaggacgcctacacgcctaccatcgaggacttccaccgcaagttctactccatccgcggcgaggtctaccagctcgacatcctcgacacgtccggcaaccacccgttccccgccatgcggcgcctctccatcctcacaggagacgttttcatcctggtgttcagtctggacaaccgcgactccttcgaggaggtgcagcggctcaggcagcagatcctcgacaccaagtcttgcctcaagaacaaaaccaaggagaacgtggacgtgcccctggtcatctgcggcaacaagggtgaccgcgacttctaccgcgaggtggaccagcgcgagatcgagcagctggtgggcgacgacccccagcgctgcgcctacttcgagatntcggccaanaaagaacagcagcctggaccagatgttccggcgcgctcttcgccatggccaanctgcccagcgagatgagnccaaancttgcaccgcaangttctcggtgcagtactgcnacgtgctgnaaaaaaanggnnctgcngaaacaaaaaactgcttgngggccggnaancggcggnggnggggggcaacccggngaanccntttggaattntngggaaccctttngnggnncgggccnaaggnttanaangnggacttttttttaattccccanaaaagncaannnccgggaagccagtcaaaagaaaaagnaggngttttntntttaattaggancccccnnccnnttngnaaaanaacttaagggaggaantttttttnannnaantnaaagggccnggntcnccccaangcgggaaaaccccccagaatgnnttttcccttcnggnaatttccccnaaan

SEQ ID NO: 855 - DNA, 1195 bp, Homo Sapiens
  misc_feature (4)..(4): n is a, c, g, or t
  misc_feature (930)..(930): n is a, c, g, or t
  misc_feature (943)..(943): n is a, c, g, or t
  misc_feature (948)..(948): n is a, c, g, or t
  misc_feature (978)..(978): n is a, c, g, or t
  misc_feature (988)..(988): n is a, c, g, or t
  misc_feature (1011)..(1011): n is a, c, g, or t
  misc_feature (1013)..(1013): n is a, c, g, or t
  misc_feature (1037)..(1037): n is a, c, g, or t
  misc_feature (1039)..(1039): n is a, c, g, or t
  misc_feature (1042)..(1043): n is a, c, g, or t
  misc_feature (1046)..(1046): n is a, c, g, or t
  misc_feature (1053)..(1053): n is a, c, g, or t
  misc_feature (1057)..(1057): n is a, c, g, or t
  misc_feature (1067)..(1067): n is a, c, g, or t
  misc_feature (1097)..(1097): n is a, c, g, or t
  misc_feature (1101)..(1101): n is a, c, g, or t
  misc_feature (1115)..(1116): n is a, c, g, or t
  misc_feature (1122)..(1122): n is a, c, g, or t
  misc_feature (1135)..(1135): n is a, c, g, or t
  misc_feature (1143)..(1143): n is a, c, g, or t
  misc_feature (1148)..(1148): n is a, c, g, or t
  misc_feature (1152)..(1152): n is a, c, g, or t
  misc_feature (1162)..(1164): n is a, c, g, or t
  misc_feature (1169)..(1169): n is a, c, g, or t
  misc_feature (1173)..(1173): n is a, c, g, or t
  misc_feature (1180)..(1180): n is a, c, g, or t
  misc_feature (1186)..(1186): n is a, c, g, or t
  misc_feature (1189)..(1189): n is a, c, g, or t
  misc_feature (1191)..(1191): n is a, c, g, or t
  misc_feature (1195)..(1195): n is a, c, g, or t
gatngagagattactatgagaggatcgcatcaccatcaccatcacggatcctatttaggtgacactatagaatcgtcgacccacgcgtccggtcggcttgtcaggtggtggaggaaaaggcgctccgtcatggggatccagacgagccccgtcctgctggcctccctgggggtggggctggtcactctgctcggcctggctgtgggctcctacttggttcggaggtcccgccggcctcaggtcactctcctggaccccaatgaaaagtacctgctacgactgctagacaagacgactgtgagccacaacaccaagaggttccgctttgccctgcccaccgcccaccacactctggggctgcctgtgggcaaacatatctacctctccacccgaattgatggcagcctggtcatcaggccatacactcctgtcaccagtgatgaggatcaaggctatgtggatcttgtcatcaaggtctacctgaagggtgtgcaccccaaatttcctgagggagggaagatgtctcagtacctggatagcctgaaggttggggatgtggtggagtttcgggggccaagcgggttgctcacttacactggaaaagggcattttaacattcagcccaacaagaaatctccaccagaaccccgagtggcgaagaaactgggaatgattgccggcgggacaggaatcaccccaatgctacagctgatccgggccatcctgaaagtccctgaagatccaacccagtgctttctgctttttgccaaccagacagaaaaggatatcatcttgcgggaggacttaaaggaactgcaggcccgctatccccaatcgctttaagctctggttcactctggatcatcccccaaaaaaattgggcctacagcaagggctttgtgactgccgacatgatccgggaacacctgncccgctccagggnatgangtgctggtactgctttgtgggccacccccnaatggtgcancttggcctgccatccccaacttngnaaaaactggggctactcccaaaananggnnatncccctantgancatcctccanctttcctggggctgttccctgcaattgttncccntccatactcaaccnntaaaancccttaaaattcnttttcccnaaaantttnaggttttttnnntttanatcnaaaactnaaattnggnanaaan

SEQ ID NO: 856 - DNA, 1415 bp, Homo Sapiens
  misc_feature (879)..(879): n is a, c, g, or t
  misc_feature (947)..(947): n is a, c, g, or t
  misc_feature (952)..(952): n is a, c, g, or t
  misc_feature (975)..(975): n is a, c, g, or t
  misc_feature (983)..(983): n is a, c, g, or t
  misc_feature (997)..(997): n is a, c, g, or t
  misc_feature (1009)..(1009): n is a, c, g, or t
  misc_feature (1014)..(1014): n is a, c, g, or t
  misc_feature (1017)..(1017): n is a, c, g, or t
  misc_feature (1020)..(1020): n is a, c, g, or t
  misc_feature (1061)..(1061): n is a, c, g, or t
  misc_feature (1064)..(1064): n is a, c, g, or t
  misc_feature (1069)..(1069): n is a, c, g, or t
  misc_feature (1072)..(1073): n is a, c, g, or t
  misc_feature (1078)..(1078): n is a, c, g, or t
  misc_feature (1086)..(1086): n is a, c, g, or t
  misc_feature (1088)..(1089): n is a, c, g, or t
  misc_feature (1095)..(1095): n is a, c, g, or t
  misc_feature (1097)..(1097): n is a, c, g, or t
  misc_feature (1107)..(1107): n is a, c, g, or t
  misc_feature (1126)..(1126): n is a, c, g, or t
  misc_feature (1138)..(1138): n is a, c, g, or t
  misc_feature (1142)..(1142): n is a, c, g, or t
  misc_feature (1158)..(1159): n is a, c, g, or t
  misc_feature (1162)..(1162): n is a, c, g, or t
  misc_feature (1173)..(1173): n is a, c, g, or t
  misc_feature (1175)..(1175): n is a, c, g, or t
  misc_feature (1179)..(1179): n is a, c, g, or t
  misc_feature (1184)..(1184): n is a, c, g, or t
  misc_feature (1217)..(1218): n is a, c, g, or t
  misc_feature (1224)..(1225): n is a, c, g, or t
  misc_feature (1227)..(1227): n is a, c, g, or t
  misc_feature (1234)..(1234): n is a, c, g, or t
  misc_feature (1236)..(1238): n is a, c, g, or t
  misc_feature (1240)..(1240): n is a, c, g, or t
  misc_feature (1246)..(1246): n is a, c, g, or t
  misc_feature (1264)..(1265): n is a, c, g, or t
  misc_feature (1278)..(1278): n is a, c, g, or t
  misc_feature (1281)..(1281): n is a, c, g, or t
  misc_feature (1283)..(1283): n is a, c, g, or t
  misc_feature (1291)..(1291): n is a, c, g, or t
  misc_feature (1293)..(1293): n is a, c, g, or t
  misc_feature (1296)..(1296): n is a, c, g, or t
  misc_feature (1312)..(1312): n is a, c, g, or t
  misc_feature (1318)..(1318): n is a, c, g, or t
  misc_feature (1322)..(1322): n is a, c, g, or t
  misc_feature (1329)..(1331): n is a, c, g, or t
  misc_feature (1336)..(1336): n is a, c, g, or t
  misc_feature (1340)..(1340): n is a, c, g, or t
  misc_feature (1345)..(1345): n is a, c, g, or t
  misc_feature (1355)..(1356): n is a, c, g, or t
  misc_feature (1364)..(1364): n is a, c, g, or t
  misc_feature (1366)..(1366): n is a, c, g, or t
  misc_feature (1378)..(1381): n is a, c, g, or t
  misc_feature (1383)..(1387): n is a, c, g, or t
  misc_feature (1394)..(1394): n is a, c, g, or t
  misc_feature (1404)..(1404): n is a, c, g, or t
  misc_feature (1412)..(1412): n is a, c, g, or t
  misc_feature (1415)..(1415): n is a, c, g, or t
atagagaaattactatgagaggatcgcatcaccatcaccatcacggatcctatttaggtgacactatagaatcgtcgacccacgcgtccgcaagctttcgaagacacatgatggcacacactggagatggccctcataaatgcacagtatgtgggaaagcctttgattctcctagtgtatttcaaagacatgaaaggactcacactggagagaaaccctatgaatgcaagcaatgtgggaaagccttccgtacttccagttcccttcgaaaacatgaaacaacacacactggagagcaaccctataaatgtaaatgtggaaaagcttttagtgatttattttcctttcaaagtcatgaaacaacacacagtgaagaggagccttatgaatgtaaggagtgtgggaaagcatttagttcttttaaatacttttgtcgccatgaaaggactcacagtgaagaaaaatcttatgagtgtcaaatttgtggcaaagccttcagtcgtttcagttacttaaaaactcatgaaaggactcacacggcagagaagccatatgaatgtaagcaatgcaggaaagcattcttttggccctctttccttctaagacatgaaaggactcacactggagaaagaccctatgaatgtaaacactgtggtaaagccttcagtcgttccagtttctgtcgagaacatgaaagaactcacactggagagaagccctatgaatgtaaggaatgtgggaaagccttcagttctctcagttcctttaatagacataaaaggacacactggaaggatattctataagtgtatggaatgtgggaaagcattcattggttttatcacattcagatacttgaaagaaataaatcctgtgaantgtaaacgtggtaaagccttaaaaagtttccaggctgggcgcagcggctcacacctgtaatcccagcnctttngagaggccgaggagggcagatcncgaggccnggaaatcgagaccngcctggctaacntgggnaanccngtccctctaaaaaatacggaaaaaaaaaaaatagcccggcntanttgcnccnnccggnagtcctancnncccggngnctgaggcggnaaatcccttgaacccgganggggaggttgcnggancccaaattgccctacnnccnccccctggggncnaagngaacnccctcccaaaaaaaaaaaaggggggcccccccnnggggcnnanaacctantnnngnctgggncccggggaaacccaaagnncccaacccctggnttntnaaacccgngnccngggtttttggggaacncccccngggnttcgggnnnggccnaggnaaaancggatccccnnatcccggncnaaaattgggttnnnntnnnnnaaccccnggattctttnaaaaaaanttn

SEQ ID NO: 857 - DNA, 1006 bp, Homo Sapiens
  misc_feature (829)..(829): n is a, c, g, or t
  misc_feature (869)..(869): n is a, c, g, or t
  misc_feature (890)..(890): n is a, c, g, or t
  misc_feature (894)..(894): n is a, c, g, or t
  misc_feature (897)..(897): n is a, c, g, or t
  misc_feature (899)..(899): n is a, c, g, or t
  misc_feature (908)..(908): n is a, c, g, or t
  misc_feature (913)..(913): n is a, c, g, or t
  misc_feature (947)..(1006): n is a, c, g, or t
ttagagaaattactatgagaggatcgcatcaccatcaccatcacggatcctatttaggtgacactatagaatcgtcgacccacgcgtccggtcgccgccggggcgactcggagtcagaggaagatgagcaggactcagaggaggttcgattaaaactggaagagaccagagaagtacagaacttgaggaagaggcccaacggggtgagtgctgtggccttgctggtgggagagaaggtacaagaggagaccactctagtggatgatccctttcagatgaagacaggtggtatggtggatatgaagaaactgaaggaaaggggcaaagataagatcagtgaggaggaggacctgcacctggggacatcgttttctgcagaaaccaaccgaagggatgaggatgcagacatgatgaagtacattgagacagagctaaagaagaggaaagggatcgtggaacatgaggaacagaaagttaagccaaagaatgcagaggactgtctttatgaacttccagaaaacatccgtgtttcctcagcaaagaagaccgaggagatgctttccaaccagatgctgagtggcattcctgaggtggacctgggcatcgagtatgtttgagacccctaggcagaagacacagtgctttccagttaaaagttatgggggacaggccaggcacggtggctcatgcctgtaatcctagcactttgggaggctgaggcgggtggatcacgaggtcaggagttcaagaccagcccggccaagatggtcgaaccccgtctctactaaaaatacaaaaattagctgggcatggtggcaggcacctgtantccagctacttggggaggctgaggcaggaaattgcttganccctgaaggtggaggttgcantgangcnanatcatgccnctgcnctccagtctggcgacaaaccagactccctctccnnnnnnnnnnnnnnnnnnnnnnnnnnnnnnnnnnnnnnnnnnnnnnnnnnnnnnnnnnnn

SEQ ID NO: 858 - DNA, 1331 bp, Homo Sapiens
  misc_feature (1)..(1): n is a, c, g, or t
  misc_feature (941)..(941): n is a, c, g, or t
  misc_feature (999)..(999): n is a, c, g, or t
  misc_feature (1013)..(1013): n is a, c, g, or t
  misc_feature (1020)..(1020): n is a, c, g, or t
  misc_feature (1027)..(1027): n is a, c, g, or t
  misc_feature (1029)..(1029): n is a, c, g, or t
  misc_feature (1046)..(1047): n is a, c, g, or t
  misc_feature (1055)..(1055): n is a, c, g, or t
  misc_feature (1076)..(1076): n is a, c, g, or t
  misc_feature (1078)..(1078): n is a, c, g, or t
  misc_feature (1080)..(1080): n is a, c, g, or t
  misc_feature (1083)..(1083): n is a, c, g, or t
  misc_feature (1095)..(1095): n is a, c, g, or t
  misc_feature (1104)..(1104): n is a, c, g, or t
  misc_feature (1113)..(1113): n is a, c, g, or t
  misc_feature (1122)..(1122): n is a, c, g, or t
  misc_feature (1129)..(1129): n is a, c, g, or t
  misc_feature (1131)..(1131): n is a, c, g, or t
  misc_feature (1139)..(1139): n is a, c, g, or t
  misc_feature (1143)..(1143): n is a, c, g, or t
  misc_feature (1163)..(1163): n is a, c, g, or t
  misc_feature (1179)..(1180): n is a, c, g, or t
  misc_feature (1188)..(1188): n is a, c, g, or t
  misc_feature (1192)..(1192): n is a, c, g, or t
  misc_feature (1201)..(1201): n is a, c, g, or t
  misc_feature (1218)..(1218): n is a, c, g, or t
  misc_feature (1228)..(1228): n is a, c, g, or t
  misc_feature (1247)..(1247): n is a, c, g, or t
  misc_feature (1249)..(1249): n is a, c, g, or t
  misc_feature (1252)..(1252): n is a, c, g, or t
  misc_feature (1255)..(1255): n is a, c, g, or t
  misc_feature (1257)..(1257): n is a, c, g, or t
  misc_feature (1262)..(1263): n is a, c, g, or t
  misc_feature (1277)..(1277): n is a, c, g, or t
  misc_feature (1283)..(1283): n is a, c, g, or t
  misc_feature (1286)..(1286): n is a, c, g, or t
  misc_feature (1297)..(1297): n is a, c, g, or t
  misc_feature (1305)..(1305): n is a, c, g, or t
  misc_feature (1307)..(1308): n is a, c, g, or t
  misc_feature (1311)..(1311): n is a, c, g, or t
  misc_feature (1314)..(1314): n is a, c, g, or t
  misc_feature (1328)..(1328): n is a, c, g, or t
  misc_feature (1331)..(1331): n is a, c, g, or t
naatagagaaattactatgagaggatcgcatcaccatcaccatcacggatcctatttaggtgacactatagaatcgtcgacccacgcgtccggggacgaagaacatcaagttttaaaagccagttatgaagcatttaagaataatgactttcagttgggaaaagaattttcaatggccagggaaacagttggctattcatcatcttcggcacttatgacaacattaacacagaatgccagttcatcagcagccgactcacggagtggtcgaaagagcaaaaacaacaacaagtcttcaagccagcagtcatcatcttcctcctcctcttcttccttatcatcgtgttcttcatcatcaactgttgtacaagaaatctctcaacaaacaactgtagtgccagaatctgattcaaatagtcaggttgattggacttacgacccaaatgaacctcgatactgcatttgtaatcaggtatcttatggtgagatggtgggatgtgataaccaagattgccctatagaatggttccattatggctgcgttggattgacagaggcaccaaaaggcaaatggtactgtccacagtgcactgctgcaatgaagagaagaggcagcagacacaaataaaggtggtccttttgtttgatgaagaaataaacttcagctgaagattttatataggactttaaaaagaagagaagagaaagaagaaacaatgcatttccaggcaaccacttaaaggatttacatagacaatcctataagatcttgaacttgaattttatgggttgtattttaataatgtaagtaaattatttatgcactcctggtgtgctatgaatattattccagttagccttggattatttcagtggccaacatatgcagacatttgtactcctcaaccattttctcaagtaatgggcattctatgatttanacttcaaggaattccaatgatgaagattttaaggaaagtattttatattccaccaggnatattctgctgcangtactgnactccananctgttatgtaacactgnnataaaaanggttgcaaaaaaaaaaaaaangncnggngcttctaaaaanaaatttaanaaaaagggnttttaaaangcccttnanaaaaagcnttgntttttttggggaaaactaanttccccaggctgaaannaaaagggnttcnggggaaaanggggggcgggatccccncaaaaaaccnggggaaaaaaaacaaaacncncgnggngnaaaannaattgggccataanccttcnagnttccgcccccnaaaaaggncnntcngangggagggggggggnaan

SEQ ID NO: 859 - DNA, 1703 bp, Homo Sapiens
  misc_feature (3)..(6): n is a, c, g, or t
  misc_feature (14)..(14): n is a, c, g, or t
  misc_feature (16)..(16): n is a, c, g, or t
  misc_feature (18)..(18): n is a, c, g, or t
  misc_feature (20)..(20): n is a, c, g, or t
  misc_feature (22)..(22): n is a, c, g, or t
  misc_feature (25)..(25): n is a, c, g, or t
  misc_feature (30)..(30): n is a, c, g, or t
  misc_feature (40)..(40): n is a, c, g, or t
  misc_feature (42)..(42): n is a, c, g, or t
  misc_feature (51)..(51): n is a, c, g, or t
  misc_feature (58)..(58): n is a, c, g, or t
  misc_feature (62)..(63): n is a, c, g, or t
  misc_feature (66)..(66): n is a, c, g, or t
  misc_feature (72)..(72): n is a, c, g, or t
  misc_feature (81)..(81): n is a, c, g, or t
  misc_feature (96)..(96): n is a, c, g, or t
  misc_feature (110)..(110): n is a, c, g, or t
  misc_feature (115)..(115): n is a, c, g, or t
  misc_feature (124)..(124): n is a, c, g, or t
  misc_feature (126)..(127): n is a, c, g, or t
  misc_feature (130)..(130): n is a, c, g, or t
  misc_feature (137)..(138): n is a, c, g, or t
  misc_feature (148)..(148): n is a, c, g, or t
  misc_feature (152)..(152): n is a, c, g, or t
  misc_feature (157)..(157): n is a, c, g, or t
  misc_feature (160)..(160): n is a, c, g, or t
  misc_feature (163)..(163): n is a, c, g, or t
  misc_feature (170)..(170): n is a, c, g, or t
  misc_feature (176)..(176): n is a, c, g, or t
  misc_feature (179)..(179): n is a, c, g, or t
  misc_feature (195)..(196): n is a, c, g, or t
  misc_feature (198)..(199): n is a, c, g, or t
  misc_feature (201)..(202): n is a, c, g, or t
  misc_feature (204)..(207): n is a, c, g, or t
  misc_feature (215)..(215): n is a, c, g, or t
  misc_feature (221)..(221): n is a, c, g, or t
  misc_feature (234)..(234): n is a, c, g, or t
  misc_feature (238)..(238): n is a, c, g, or t
  misc_feature (240)..(240): n is a, c, g, or t
  misc_feature (244)..(244): n is a, c, g, or t
  misc_feature (251)..(251): n is a, c, g, or t
  misc_feature (254)..(255): n is a, c, g, or t
  misc_feature (257)..(257): n is a, c, g, or t
  misc_feature (259)..(259): n is a, c, g, or t
  misc_feature (262)..(263): n is a, c, g, or t
  misc_feature (265)..(266): n is a, c, g, or t
  misc_feature (282)..(282): n is a, c, g, or t
  misc_feature (290)..(290): n is a, c, g, or t
  misc_feature (294)..(294): n is a, c, g, or t
  misc_feature (301)..(301): n is a, c, g, or t
  misc_feature (305)..(305): n is a, c, g, or t
  misc_feature (308)..(308): n is a, c, g, or t
  misc_feature (314)..(314): n is a, c, g, or t
  misc_feature (317)..(317): n is a, c, g, or t
  misc_feature (319)..(319): n is a, c, g, or t
  misc_feature (322)..(322): n is a, c, g, or t
  misc_feature (325)..(325): n is a, c, g, or t
  misc_feature (327)..(327): n is a, c, g, or t
  misc_feature (329)..(329): n is a, c, g, or t
  misc_feature (333)..(333): n is a, c, g, or t
  misc_feature (340)..(340): n is a, c, g, or t
  misc_feature (343)..(344): n is a, c, g, or t
  misc_feature (348)..(350): n is a, c, g, or t
  misc_feature (354)..(354): n is a, c, g, or t
  misc_feature (362)..(363): n is a, c, g, or t
  misc_feature (376)..(376): n is a, c, g, or t
  misc_feature (381)..(382): n is a, c, g, or t
  misc_feature (385)..(386): n is a, c, g, or t
  misc_feature (388)..(391): n is a, c, g, or t
  misc_feature (394)..(394): n is a, c, g, or t
  misc_feature (397)..(397): n is a, c, g, or t
  misc_feature (400)..(400): n is a, c, g, or t
  misc_feature (402)..(403): n is a, c, g, or t
  misc_feature (410)..(410): n is a, c, g, or t
  misc_feature (412)..(412): n is a, c, g, or t
  misc_feature (418)..(418): n is a, c, g, or t
  misc_feature (420)..(420): n is a, c, g, or t
  misc_feature (431)..(431): n is a, c, g, or t
  misc_feature (433)..(434): n is a, c, g, or t
  misc_feature (437)..(437): n is a, c, g, or t
  misc_feature (439)..(439): n is a, c, g, or t
  misc_feature (443)..(443): n is a, c, g, or t
  misc_feature (454)..(455): n is a, c, g, or t
  misc_feature (457)..(457): n is a, c, g, or t
  misc_feature (467)..(468): n is a, c, g, or t
  misc_feature (473)..(474): n is a, c, g, or t
  misc_feature (478)..(478): n is a, c, g, or t
  misc_feature (481)..(481): n is a, c, g, or t
  misc_feature (498)..(498): n is a, c, g, or t
  misc_feature (504)..(505): n is a, c, g, or t
  misc_feature (513)..(513): n is a, c, g, or t
  misc_feature (520)..(521): n is a, c, g, or t
  misc_feature (525)..(526): n is a, c, g, or t
  misc_feature (541)..(541): n is a, c, g, or t
  misc_feature (547)..(549): n is a, c, g, or t
  misc_feature (553)..(553): n is a, c, g, or t
  misc_feature (559)..(559): n is a, c, g, or t
  misc_feature (569)..(569): n is a, c, g, or t
  misc_feature (573)..(574): n is a, c, g, or t
  misc_feature (576)..(576): n is a, c, g, or t
  misc_feature (579)..(580): n is a, c, g, or t
  misc_feature (583)..(584): n is a, c, g, or t
  misc_feature (586)..(586): n is a, c, g, or t
  misc_feature (589)..(589): n is a, c, g, or t
  misc_feature (594)..(594): n is a, c, g, or t
  misc_feature (596)..(596): n is a, c, g, or t
  misc_feature (599)..(599): n is a, c, g, or t
  misc_feature (601)..(601): n is a, c, g, or t
  misc_feature (603)..(603): n is a, c, g, or t
  misc_feature (608)..(608): n is a, c, g, or t
  misc_feature (611)..(611): n is a, c, g, or t
  misc_feature (613)..(613): n is a, c, g, or t
  misc_feature (617)..(618): n is a, c, g, or t
  misc_feature (633)..(636): n is a, c, g, or t
  misc_feature (638)..(638): n is a, c, g, or t
  misc_feature (643)..(644): n is a, c, g, or t
  misc_feature (648)..(648): n is a, c, g, or t
  misc_feature (655)..(655): n is a, c, g, or t
  misc_feature (660)..(660): n is a, c, g, or t
  misc_feature (662)..(663): n is a, c, g, or t
  misc_feature (666)..(670): n is a, c, g, or t
  misc_feature (673)..(675): n is a, c, g, or t
  misc_feature (688)..(689): n is a, c, g, or t
  misc_feature (693)..(693): n is a, c, g, or t
  misc_feature (695)..(695): n is a, c, g, or t
  misc_feature (698)..(699): n is a, c, g, or t
  misc_feature (702)..(702): n is a, c, g, or t
  misc_feature (705)..(706): n is a, c, g, or t
  misc_feature (715)..(715): n is a, c, g, or t
  misc_feature (723)..(723): n is a, c, g, or t
  misc_feature (725)..(726): n is a, c, g, or t
  misc_feature (729)..(729): n is a, c, g, or t
  misc_feature (731)..(731): n is a, c, g, or t
  misc_feature (733)..(733): n is a, c, g, or t
  misc_feature (740)..(740): n is a, c, g, or t
  misc_feature (743)..(743): n is a, c, g, or t
  misc_feature (747)..(747): n is a, c, g, or t
  misc_feature (749)..(749): n is a, c, g, or t
  misc_feature (751)..(751): n is a, c, g, or t
  misc_feature (753)..(756): n is a, c, g, or t
  misc_feature (764)..(765): n is a, c, g, or t
  misc_feature (769)..(769): n is a, c, g, or t
  misc_feature (776)..(776): n is a, c, g, or t
  misc_feature (783)..(785): n is a, c, g, or t
  misc_feature (787)..(789): n is a, c, g, or t
  misc_feature (791)..(792): n is a, c, g, or t
  misc_feature (794)..(794): n is a, c, g, or t
  misc_feature (796)..(796): n is a, c, g, or t
  misc_feature (798)..(799): n is a, c, g, or t
  misc_feature (801)..(801): n is a, c, g, or t
  misc_feature (804)..(804): n is a, c, g, or t
  misc_feature (806)..(808): n is a, c, g, or t
  misc_feature (815)..(815): n is a, c, g, or t
  misc_feature (818)..(818): n is a, c, g, or t
  misc_feature (821)..(825): n is a, c, g, or t
  misc_feature (828)..(828): n is a, c, g, or t
  misc_feature (832)..(832): n is a, c, g, or t
  misc_feature (834)..(834): n is a, c, g, or t
  misc_feature (836)..(836): n is a, c, g, or t
  misc_feature (846)..(846): n is a, c, g, or t
  misc_feature (848)..(848): n is a, c, g, or t
  misc_feature (852)..(854): n is a, c, g, or t
  misc_feature (856)..(856): n is a, c, g, or t
  misc_feature (859)..(859): n is a, c, g, or t
  misc_feature (871)..(871): n is a, c, g, or t
  misc_feature (873)..(873): n is a, c, g, or t
  misc_feature (875)..(875): n is a, c, g, or t
  misc_feature (878)..(878): n is a, c, g, or t
  misc_feature (880)..(882): n is a, c, g, or t
  misc_feature (884)..(885): n is a, c, g, or t
  misc_feature (888)..(888): n is a, c, g, or t
  misc_feature (897)..(897): n is a, c, g, or t
  misc_feature (901)..(903): n is a, c, g, or t
  misc_feature (905)..(906): n is a, c, g, or t
  misc_feature (908)..(909): n is a, c, g, or t
  misc_feature (922)..(923): n is a, c, g, or t
  misc_feature (925)..(925): n is a, c, g, or t
  misc_feature (928)..(928): n is a, c, g, or t
  misc_feature (931)..(932): n is a, c, g, or t
  misc_feature (934)..(935): n is a, c, g, or t
  misc_feature (937)..(937): n is a, c, g, or t
  misc_feature (939)..(939): n is a, c, g, or t
  misc_feature (945)..(945): n is a, c, g, or t
  misc_feature (952)..(952): n is a, c, g, or t
  misc_feature (957)..(957): n is a, c, g, or t
  misc_feature (963)..(965): n is a, c, g, or t
  misc_feature (967)..(967): n is a, c, g, or t
  misc_feature (969)..(969): n is a, c, g, or t
  misc_feature (975)..(977): n is a, c, g, or t
  misc_feature (985)..(986): n is a, c, g, or t
  misc_feature (989)..(989): n is a, c, g, or t
  misc_feature (997)..(998): n is a, c, g, or t
  misc_feature (1001)..(1003): n is a, c, g, or t
  misc_feature (1005)..(1007): n is a, c, g, or t
  misc_feature (1009)..(1010): n is a, c, g, or t
  misc_feature (1013)..(1013): n is a, c, g, or t
  misc_feature (1017)..(1017): n is a, c, g, or t
  misc_feature (1030)..(1030): n is a, c, g, or t
  misc_feature (1033)..(1035): n is a, c, g, or t
  misc_feature (1040)..(1040): n is a, c, g, or t
  misc_feature (1042)..(1045): n is a, c, g, or t
  misc_feature (1047)..(1047): n is a, c, g, or t
  misc_feature (1053)..(1053): n is a, c, g, or t
  misc_feature (1061)..(1061): n is a, c, g, or t
  misc_feature (1064)..(1064): n is a, c, g, or t
  misc_feature (1070)..(1072): n is a, c, g, or t
  misc_feature (1084)..(1084): n is a, c, g, or t
  misc_feature (1086)..(1087): n is a, c, g, or t
  misc_feature (1090)..(1090): n is a, c, g, or t
  misc_feature (1094)..(1095): n is a, c, g, or t
  misc_feature (1097)..(1100): n is a, c, g, or t
  misc_feature (1102)..(1103): n is a, c, g, or t
  misc_feature (1111)..(1112): n is a, c, g, or t
  misc_feature (1117)..(1118): n is a, c, g, or t
  misc_feature (1122)..(1122): n is a, c, g, or t
  misc_feature (1126)..(1128): n is a, c, g, or t
  misc_feature (1130)..(1131): n is a, c, g, or t
  misc_feature (1145)..(1146): n is a, c, g, or t
  misc_feature (1148)..(1148): n is a, c, g, or t
  misc_feature (1151)..(1151): n is a, c, g, or t
  misc_feature (1154)..(1154): n is a, c, g, or t
  misc_feature (1159)..(1159): n is a, c, g, or t
  misc_feature (1161)..(1163): n is a, c, g, or t
  misc_feature (1165)..(1168): n is a, c, g, or t
  misc_feature (1170)..(1170): n is a, c, g, or t
  misc_feature (1172)..(1172): n is a, c, g, or t
  misc_feature (1177)..(1177): n is a, c, g, or t
  misc_feature (1180)..(1181): n is a, c, g, or t
  misc_feature (1188)..(1189): n is a, c, g, or t
  misc_feature (1191)..(1192): n is a, c, g, or t
  misc_feature (1199)..(1200): n is a, c, g, or t
  misc_feature (1202)..(1202): n is a, c, g, or t
  misc_feature (1204)..(1204): n is a, c, g, or t
  misc_feature (1207)..(1207): n is a, c, g, or t
  misc_feature (1211)..(1211): n is a, c, g, or t
  misc_feature (1215)..(1215): n is a, c, g, or t
  misc_feature (1219)..(1219): n is a, c, g, or t
  misc_feature (1223)..(1224): n is a, c, g, or t
  misc_feature (1227)..(1227): n is a, c, g, or t
  misc_feature (1233)..(1233): n is a, c, g, or t
  misc_feature (1235)..(1235): n is a, c, g, or t
  misc_feature (1240)..(1240): n is a, c, g, or t
  misc_feature (1245)..(1246): n is a, c, g, or t
  misc_feature (1250)..(1250): n is a, c, g, or t
  misc_feature (1252)..(1253): n is a, c, g, or t
  misc_feature (1255)..(1255): n is a, c, g, or t
  misc_feature (1257)..(1260): n is a, c, g, or t
  misc_feature (1262)..(1262): n is a, c, g, or t
  misc_feature (1264)..(1265): n is a, c, g, or t
  misc_feature (1268)..(1268): n is a, c, g, or t
  misc_feature (1280)..(1280): n is a, c, g, or t
  misc_feature (1282)..(1282): n is a, c, g, or t
  misc_feature (1286)..(1286): n is a, c, g, or t
  misc_feature (1292)..(1293): n is a, c, g, or t
  misc_feature (1296)..(1296): n is a, c, g, or t
  misc_feature (1299)..(1299): n is a, c, g, or t
  misc_feature (1302)..(1302): n is a, c, g, or t
  misc_feature (1307)..(1307): n is a, c, g, or t
  misc_feature (1311)..(1311): n is a, c, g, or t
  misc_feature (1315)..(1315): n is a, c, g, or t
  misc_feature (1320)..(1321): n is a, c, g, or t
  misc_feature (1323)..(1325): n is a, c, g, or t
  misc_feature (1328)..(1328): n is a, c, g, or t
  misc_feature (1330)..(1330): n is a, c, g, or t
  misc_feature (1333)..(1333): n is a, c, g, or t
  misc_feature (1336)..(1337): n is a, c, g, or t
  misc_feature (1340)..(1340): n is a, c, g, or t
  misc_feature (1342)..(1344): n is a, c, g, or t
  misc_feature (1346)..(1346): n is a, c, g, or t
  misc_feature (1348)..(1348): n is a, c, g, or t
  misc_feature (1353)..(1354): n is a, c, g, or t
  misc_feature (1360)..(1360): n is a, c, g, or t
  misc_feature (1363)..(1363): n is a, c, g, or t
  misc_feature (1367)..(1368): n is a, c, g, or t
  misc_feature (1377)..(1379): n is a, c, g, or t
  misc_feature (1383)..(1383): n is a, c, g, or t
  misc_feature (1385)..(1385): n is a, c, g, or t
  misc_feature (1388)..(1391): n is a, c, g, or t
  misc_feature (1394)..(1394): n is a, c, g, or t
  misc_feature (1396)..(1397): n is a, c, g, or t
  misc_feature (1401)..(1401): n is a, c, g, or t
  misc_feature (1406)..(1406): n is a, c, g, or t
  misc_feature (1416)..(1416): n is a, c, g, or t
  misc_feature (1424)..(1425): n is a, c, g, or t
  misc_feature (1428)..(1428): n is a, c, g, or t
  misc_feature (1439)..(1439): n is a, c, g, or t
  misc_feature (1442)..(1442): n is a, c, g, or t
  misc_feature (1449)..(1450): n is a, c, g, or t
  misc_feature (1452)..(1454): n is a, c, g, or t
  misc_feature (1459)..(1459): n is a, c, g, or t
  misc_feature (1464)..(1466): n is a, c, g, or t
  misc_feature (1469)..(1470): n is a, c, g, or t
  misc_feature (1472)..(1474): n is a, c, g, or t
  misc_feature (1477)..(1479): n is a, c, g, or t
  misc_feature (1482)..(1483): n is a, c, g, or t
  misc_feature (1487)..(1487): n is a, c, g, or t
  misc_feature (1491)..(1492): n is a, c, g, or t
  misc_feature (1501)..(1504): n is a, c, g, or t
  misc_feature (1508)..(1508): n is a, c, g, or t
  misc_feature (1510)..(1510): n is a, c, g, or t
  misc_feature (1519)..(1520): n is a, c, g, or t
  misc_feature (1524)..(1525): n is a, c, g, or t
  misc_feature (1527)..(1529): n is a, c, g, or t
  misc_feature (1535)..(1535): n is a, c, g, or t
  misc_feature (1539)..(1539): n is a, c, g, or t
  misc_feature (1545)..(1545): n is a, c, g, or t
  misc_feature (1548)..(1548): n is a, c, g, or t
  misc_feature (1550)..(1553): n is a, c, g, or t
  misc_feature (1557)..(1557): n is a, c, g, or t
  misc_feature (1559)..(1559): n is a, c, g, or t
  misc_feature (1562)..(1565): n is a, c, g, or t
  misc_feature (1568)..(1569): n is a, c, g, or t
  misc_feature (1571)..(1572): n is a, c, g, or t
  misc_feature (1575)..(1575): n is a, c, g, or t
  misc_feature (1577)..(1579): n is a, c, g, or t
  misc_feature (1581)..(1581): n is a, c, g, or t
  misc_feature (1584)..(1584): n is a, c, g, or t
  misc_feature (1587)..(1587): n is a, c, g, or t
  misc_feature (1590)..(1590): n is a, c, g, or t
  misc_feature (1592)..(1592): n is a, c, g, or t
  misc_feature (1596)..(1597): n is a, c, g, or t
  misc_feature (1601)..(1603): n is a, c, g, or t
  misc_feature (1607)..(1607): n is a, c, g, or t
  misc_feature (1609)..(1610): n is a, c, g, or t
  misc_feature (1612)..(1612): n is a, c, g, or t
  misc_feature (1615)..(1615): n is a, c, g, or t
  misc_feature (1627)..(1627): n is a, c, g, or t
  misc_feature (1631)..(1631): n is a, c, g, or t
  misc_feature (1634)..(1634): n is a, c, g, or t
  misc_feature (1636)..(1638): n is a, c, g, or t
  misc_feature (1642)..(1643): n is a, c, g, or t
  misc_feature (1655)..(1656): n is a, c, g, or t
  misc_feature (1658)..(1658): n is a, c, g, or t
  misc_feature (1665)..(1665): n is a, c, g, or t
  misc_feature (1673)..(1673): n is a, c, g, or t
  misc_feature (1686)..(1686): n is a, c, g, or t
  misc_feature (1689)..(1689): n is a, c, g, or t
  misc_feature (1691)..(1691): n is a, c, g, or t
  misc_feature (1700)..(1700): n is a, c, g, or t
ccnnnntaaaaggncnanantnaanatgangggggtggtntnaaccagccnccacccntggnntcnttttgntggtgggangactaaaaaaaagtngttccaaccacacnacgtnccgcatgancnnacnaaggtgnnggaggcctgngcgnatatngcncgncaccacnagaatntgncttcgcctcctcctgnncnncnngnnnncccacaanatggcngcagatagtccgnatcncncctnggtaccnggnncncngtnnannccgcgtgtcgcccgangaccctgngtcnaacgagnatcntgntgtgangananctnttncngngtgnaggtgcngtnncagnnncacntgccattnnttgagacctgggncattnnctnncnnnnggnaanatntnnagccctncngtgccngnctcaactcaantnntantnagtnctgaattagannangcttgctgcnnatttnnaaanagntattcgcactgaagacngtcgtnncgcaattntgagacnnactnntcggaatgagagtgntagtannntttnaagaancccgtgtatntgcnnancgnncanngnctntaggnanccncntnaatcnacnanttanncgtgaaaggaacatnnnngnggtannccanctgaacngtacntnnacnnnnnttnnntgtgaggagatanncacnanaanncanagnngcttccttntcctaagncnntancntngttagcngancatntnanannnnctttggannaatnctagtancgctcgnnncnnncnncntncnntnttncnnngcagaancgngtnnnnnacncctntncnaacccaatancnggannntnttnttctgatggccntntnccnannnanncantagtccccnctgnnntnncnncgctagggctttnntnatnttnntnncntncataancaaatgnagtgntttatnnnantnattgannnaaagggtnngcnaaccaacnnctnnntnnntnncgnaatnactataaaattgngtnnngtgcngnnnncntcctgnctatttcngangcgtannntaagccatcccntnnccntttnncnnnntnnatatattnnctaannttcntgtnnntnnaggaacttttaatnntnttnagnatttntnnngnnnntntnaaaantanntaaaacnnanntctcttnntngnctntccnaatncttntatnnatnaactcntnaaatnctctnnatcngnngntnnnntnanncantgtatgtaaaancncatncgcctnnttnaanctngaacntcanaaantcctnngnnnccnanaantcnnctnannngncncctcnnggacgnatnattnntagatttannntacngncannnnccnanntgcnctatntcattaaaantagcgtannaanccttcctaaanagncaccacnnannnatccncagtnnnatnncnnnaannncgnngaanactnncagcagagnnnncgtntntaataattnntacnnannnaccaancaanaactantcntnnnntatnanttnnnnacnncnnganannnangtnatntanancatnnctgnnngtancnntnttntatctcatgaanatangantnnntctnnccaaatactctnncncagtagnagcatcgngcagatgagctanacncnactctcagncta

SEQ ID NO: 860 - DNA, 1602 bp, Homo Sapiens
  misc_feature (2)..(3): n is a, c, g, or t
  misc_feature (10)..(10): n is a, c, g, or t
  misc_feature (13)..(13): n is a, c, g, or t
  misc_feature (16)..(16): n is a, c, g, or t
  misc_feature (65)..(65): n is a, c, g, or t
  misc_feature (70)..(70): n is a, c, g, or t
  misc_feature (78)..(78): n is a, c, g, or t
  misc_feature (117)..(117): n is a, c, g, or t
  misc_feature (131)..(131): n is a, c, g, or t
  misc_feature (134)..(134): n is a, c, g, or t
  misc_feature (139)..(139): n is a, c, g, or t
  misc_feature (142)..(142): n is a, c, g, or t
  misc_feature (145)..(146): n is a, c, g, or t
  misc_feature (149)..(149): n is a, c, g, or t
  misc_feature (151)..(152): n is a, c, g, or t
  misc_feature (168)..(168): n is a, c, g, or t
  misc_feature (181)..(181): n is a, c, g, or t
  misc_feature (190)..(190): n is a, c, g, or t
  misc_feature (192)..(192): n is a, c, g, or t
  misc_feature (208)..(208): n is a, c, g, or t
  misc_feature (215)..(216): n is a, c, g, or t
  misc_feature (219)..(219): n is a, c, g, or t
  misc_feature (222)..(222): n is a, c, g, or t
  misc_feature (225)..(225): n is a, c, g, or t
  misc_feature (234)..(234): n is a, c, g, or t
  misc_feature (236)..(236): n is a, c, g, or t
  misc_feature (244)..(244): n is a, c, g, or t
  misc_feature (249)..(249): n is a, c, g, or t
  misc_feature (257)..(258): n is a, c, g, or t
  misc_feature (260)..(260): n is a, c, g, or t
  misc_feature (273)..(273): n is a, c, g, or t
  misc_feature (280)..(280): n is a, c, g, or t
  misc_feature (288)..(288): n is a, c, g, or t
  misc_feature (291)..(291): n is a, c, g, or t
  misc_feature (294)..(294): n is a, c, g, or t
  misc_feature (296)..(297): n is a, c, g, or t
  misc_feature (300)..(300): n is a, c, g, or t
  misc_feature (308)..(308): n is a, c, g, or t
  misc_feature (312)..(315): n is a, c, g, or t
  misc_feature (320)..(320): n is a, c, g, or t
  misc_feature (322)..(322): n is a, c, g, or t
  misc_feature (328)..(328): n is a, c, g, or t
  misc_feature (333)..(333): n is a, c, g, or t
  misc_feature (349)..(350): n is a, c, g, or t
  misc_feature (355)..(355): n is a, c, g, or t
  misc_feature (357)..(357): n is a, c, g, or t
  misc_feature (361)..(361): n is a, c, g, or t
  misc_feature (365)..(365): n is a, c, g, or t
  misc_feature (370)..(370): n is a, c, g, or t
  misc_feature (378)..(378): n is a, c, g, or t
  misc_feature (383)..(383): n is a, c, g, or t
  misc_feature (387)..(388): n is a, c, g, or t
  misc_feature (392)..(392): n is a, c, g, or t
  misc_feature (396)..(396): n is a, c, g, or t
  misc_feature (398)..(398): n is a, c, g, or t
  misc_feature (402)..(403): n is a, c, g, or t
  misc_feature (419)..(419): n is a, c, g, or t
  misc_feature (421)..(421): n is a, c, g, or t
  misc_feature (432)..(433): n is a, c, g, or t
  misc_feature (436)..(438): n is a, c, g, or t
  misc_feature (440)..(440): n is a, c, g, or t
  misc_feature (443)..(443): n is a, c, g, or t
  misc_feature (447)..(448): n is a, c, g, or t
  misc_feature (452)..(453): n is a, c, g, or t
  misc_feature (455)..(455): n is a, c, g, or t
  misc_feature (461)..(461): n is a, c, g, or t
  misc_feature (468)..(468): n is a, c, g, or t
  misc_feature (475)..(476): n is a, c, g, or t
  misc_feature (481)..(481): n is a, c, g, or t
  misc_feature (483)..(483): n is a, c, g, or t
  misc_feature (487)..(487): n is a, c, g, or t
  misc_feature (491)..(491): n is a, c, g, or t
  misc_feature (503)..(503): n is a, c, g, or t
  misc_feature (515)..(515): n is a, c, g, or t
  misc_feature (518)..(518): n is a, c, g, or t
  misc_feature (521)..(521): n is a, c, g, or t
  misc_feature (532)..(532): n is a, c, g, or t
  misc_feature (534)..(535): n is a, c, g, or t
  misc_feature (540)..(541): n is a, c, g, or t
  misc_feature (543)..(543): n is a, c, g, or t
  misc_feature (546)..(546): n is a, c, g, or t
  misc_feature (560)..(560): n is a, c, g, or t
  misc_feature (565)..(565): n is a, c, g, or t
  misc_feature (567)..(567): n is a, c, g, or t
  misc_feature (575)..(575): n is a, c, g, or t
  misc_feature (579)..(579): n is a, c, g, or t
  misc_feature (581)..(581): n is a, c, g, or t
  misc_feature (583)..(583): n is a, c, g, or t
  misc_feature (585)..(587): n is a, c, g, or t
  misc_feature (589)..(589): n is a, c, g, or t
  misc_feature (593)..(593): n is a, c, g, or t
  misc_feature (600)..(600): n is a, c, g, or t
  misc_feature (614)..(614): n is a, c, g, or t
  misc_feature (616)..(616): n is a, c, g, or t
  misc_feature (620)..(620): n is a, c, g, or t
  misc_feature (625)..(625): n is a, c, g, or t
  misc_feature (628)..(629): n is a, c, g, or t
  misc_feature (632)..(632): n is a, c, g, or t
  misc_feature (645)..(645): n is a, c, g, or t
  misc_feature (650)..(650): n is a, c, g, or t
  misc_feature (658)..(659): n is a, c, g, or t
  misc_feature (661)..(661): n is a, c, g, or t
  misc_feature (668)..(668): n is a, c, g, or t
  misc_feature (676)..(676): n is a, c, g, or t
  misc_feature (679)..(680): n is a, c, g, or t
  misc_feature (685)..(686): n is a, c, g, or t
  misc_feature (692)..(694): n is a, c, g, or t
  misc_feature (696)..(696): n is a, c, g, or t
  misc_feature (704)..(704): n is a, c, g, or t
  misc_feature (706)..(706): n is a, c, g, or t
  misc_feature (709)..(711): n is a, c, g, or t
  misc_feature (715)..(717): n is a, c, g, or t
  misc_feature (720)..(720): n is a, c, g, or t
  misc_feature (724)..(724): n is a, c, g, or t
  misc_feature (728)..(728): n is a, c, g, or t
  misc_feature (734)..(734): n is a, c, g, or t
  misc_feature (736)..(736): n is a, c, g, or t
  misc_feature (738)..(741): n is a, c, g, or t
  misc_feature (743)..(743): n is a, c, g, or t
  misc_feature (746)..(746): n is a, c, g, or t
  misc_feature (754)..(754): n is a, c, g, or t
  misc_feature (757)..(757): n is a, c, g, or t
  misc_feature (759)..(759): n is a, c, g, or t
  misc_feature (766)..(766): n is a, c, g, or t
  misc_feature (770)..(770): n is a, c, g, or t
  misc_feature (773)..(773): n is a, c, g, or t
  misc_feature (776)..(777): n is a, c, g, or t
  misc_feature (779)..(779): n is a, c, g, or t
  misc_feature (781)..(781): n is a, c, g, or t
  misc_feature (785)..(785): n is a, c, g, or t
  misc_feature (794)..(795): n is a, c, g, or t
  misc_feature (806)..(806): n is a, c, g, or t
  misc_feature (809)..(809): n is a, c, g, or t
  misc_feature (811)..(811): n is a, c, g, or t
  misc_feature (813)..(813): n is a, c, g, or t
  misc_feature (815)..(816): n is a, c, g, or t
  misc_feature (818)..(818): n is a, c, g, or t
  misc_feature (827)..(827): n is a, c, g, or t
  misc_feature (833)..(834): n is a, c, g, or t
  misc_feature (836)..(837): n is a, c, g, or t
  misc_feature (840)..(841): n is a, c, g, or t
  misc_feature (847)..(847): n is a, c, g, or t
  misc_feature (849)..(851): n is a, c, g, or t
  misc_feature (853)..(856): n is a, c, g, or t
  misc_feature (860)..(862): n is a, c, g, or t
  misc_feature (866)..(866): n is a, c, g, or t
  misc_feature (869)..(869): n is a, c, g, or t
  misc_feature (871)..(872): n is a, c, g, or t
  misc_feature (874)..(874): n is a, c, g, or t
  misc_feature (877)..(877): n is a, c, g, or t
  misc_feature (879)..(880): n is a, c, g, or t
  misc_feature (882)..(884): n is a, c, g, or t
  misc_feature (887)..(887): n is a, c, g, or t
  misc_feature (889)..(889): n is a, c, g, or t
  misc_feature (896)..(898): n is a, c, g, or t
  misc_feature (904)..(906): n is a, c, g, or t
  misc_feature (909)..(909): n is a, c, g, or t
  misc_feature (912)..(912): n is a, c, g, or t
  misc_feature (916)..(916): n is a, c, g, or t
  misc_feature (918)..(918): n is a, c, g, or t
  misc_feature (921)..(921): n is a, c, g, or t
  misc_feature (926)..(929): n is a, c, g, or t
  misc_feature (933)..(933): n is a, c, g, or t
  misc_feature (935)..(936): n is a, c, g, or t
  misc_feature (938)..(938): n is a, c, g, or t
  misc_feature (940)..(942): n is a, c, g, or t
  misc_feature (944)..(945): n is a, c, g, or t
  misc_feature (947)..(947): n is a, c, g, or t
  misc_feature (950)..(950): n is a, c, g, or t
  misc_feature (952)..(952): n is a, c, g, or t
  misc_feature (954)..(954): n is a, c, g, or t
  misc_feature (959)..(960): n is a, c, g, or t
  misc_feature (965)..(967): n is a, c, g, or t
  misc_feature (970)..(970): n is a, c, g, or t
  misc_feature (972)..(972): n is a, c, g, or t
  misc_feature (980)..(980): n is a, c, g, or t
  misc_feature (988)..(989): n is a, c, g, or t
  misc_feature (992)..(993): n is a, c, g, or t
  misc_feature (996)..(1000): n is a, c, g, or t
  misc_feature (1003)..(1005): n is a, c, g, or t
  misc_feature (1009)..(1011): n is a, c, g, or t
  misc_feature (1017)..(1017): n is a, c, g, or t
  misc_feature (1020)..(1020): n is a, c, g, or t
  misc_feature (1024)..(1025): n is a, c, g, or t
  misc_feature (1030)..(1030): n is a, c, g, or t
  misc_feature (1032)..(1032): n is a, c, g, or t
  misc_feature (1034)..(1034): n is a, c, g, or t
  misc_feature (1039)..(1039): n is a, c, g, or t
  misc_feature (1043)..(1044): n is a, c, g, or t
  misc_feature (1046)..(1046): n is a, c, g, or t
  misc_feature (1049)..(1049): n is a, c, g, or t
  misc_feature (1051)..(1051): n is a, c, g, or t
  misc_feature (1053)..(1053): n is a, c, g, or t
  misc_feature (1057)..(1057): n is a, c, g, or t
  misc_feature (1061)..(1061): n is a, c, g, or t
  misc_feature (1066)..(1066): n is a, c, g, or t
  misc_feature (1068)..(1068): n is a, c, g, or t
  misc_feature (1070)..(1070): n is a, c, g, or t
  misc_feature (1080)..(1080): n is a, c, g, or t
  misc_feature (1082)..(1084): n is a, c, g, or t
  misc_feature (1086)..(1086): n is a, c, g, or t
  misc_feature (1096)..(1096): n is a, c, g, or t
  misc_feature (1101)..(1101): n is a, c, g, or t
  misc_feature (1105)..(1106): n is a, c, g, or t
  misc_feature (1108)..(1110): n is a, c, g, or t
  misc_feature (1115)..(1115): n is a, c, g, or t
  misc_feature (1117)..(1118): n is a, c, g, or t
  misc_feature (1122)..(1122): n is a, c, g, or t
  misc_feature (1127)..(1129): n is a, c, g, or t
  misc_feature (1131)..(1131): n is a, c, g, or t
  misc_feature (1135)..(1136): n is a, c, g, or t
  misc_feature (1140)..(1141): n is a, c, g, or t
  misc_feature (1143)..(1144): n is a, c, g, or t
  misc_feature (1147)..(1147): n is a, c, g, or t
  misc_feature (1150)..(1150): n is a, c, g, or t
  misc_feature (1152)..(1152): n is a, c, g, or t
  misc_feature (1154)..(1154): n is a, c, g, or t
  misc_feature (1158)..(1158): n is a, c, g, or t
  misc_feature (1163)..(1163): n is a, c, g, or t
  misc_feature (1165)..(1166): n is a, c, g, or t
  misc_feature (1171)..(1171): n is a, c, g, or t
  misc_feature (1173)..(1173): n is a, c, g, or t
  misc_feature (1176)..(1176): n is a, c, g, or t
  misc_feature (1180)..(1180): n is a, c, g, or t
  misc_feature (1182)..(1183): n is a, c, g, or t
  misc_feature (1186)..(1186): n is a, c, g, or t
  misc_feature (1190)..(1190): n is a, c, g, or t
  misc_feature (1195)..(1195): n is a, c, g, or t
  misc_feature (1198)..(1198): n is a, c, g, or t
  misc_feature (1201)..(1201): n is a, c, g, or t
  misc_feature (1203)..(1203): n is a, c, g, or t
  misc_feature (1206)..(1206): n is a, c, g, or t
  misc_feature (1215)..(1215): n is a, c, g, or t
  misc_feature (1217)..(1217): n is a, c, g, or t
  misc_feature (1222)..(1223): n is a, c, g, or t
  misc_feature (1230)..(1230): n is a, c, g, or t
  misc_feature (1233)..(1233): n is a, c, g, or t
  misc_feature (1238)..(1239): n is a, c, g, or t
  misc_feature (1241)..(1241): n is a, c, g, or t
  misc_feature (1247)..(1247): n is a, c, g, or t
  misc_feature (1250)..(1250): n is a, c, g, or t
  misc_feature (1252)..(1252): n is a, c, g, or t
  misc_feature (1255)..(1255): n is a, c, g, or t
  misc_feature (1257)..(1257): n is a, c, g, or t
  misc_feature (1262)..(1263): n is a, c, g, or t
  misc_feature (1265)..(1267): n is a, c, g, or t
  misc_feature (1269)..(1270): n is a, c, g, or t
  misc_feature (1273)..(1273): n is a, c, g, or t
  misc_feature (1275)..(1275): n is a, c, g, or t
  misc_feature (1277)..(1277): n is a, c, g, or t
  misc_feature (1279)..(1279): n is a, c, g, or t
  misc_feature (1281)..(1281): n is a, c, g, or t
  misc_feature (1284)..(1285): n is a, c, g, or t
  misc_feature (1295)..(1295): n is a, c, g, or t
  misc_feature (1297)..(1300): n is a, c, g, or t
  misc_feature (1303)..(1303): n is a, c, g, or t
  misc_feature (1305)..(1305): n is a, c, g, or t
  misc_feature (1308)..(1308): n is a, c, g, or t
  misc_feature (1311)..(1311): n is a, c, g, or t
  misc_feature (1313)..(1313): n is a, c, g, or t
  misc_feature (1315)..(1316): n is a, c, g, or t
  misc_feature (1320)..(1321): n is a, c, g, or t
  misc_feature (1323)..(1323): n is a, c, g, or t
  misc_feature (1327)..(1328): n is a, c, g, or t
  misc_feature (1330)..(1330): n is a, c, g, or t
  misc_feature (1342)..(1342): n is a, c, g, or t
  misc_feature (1344)..(1345): n is a, c, g, or t
  misc_feature (1347)..(1348): n is a, c, g, or t
  misc_feature (1356)..(1356): n is a, c, g, or t
  misc_feature (1362)..(1362): n is a, c, g, or t
  misc_feature (1365)..(1365): n is a, c, g, or t
  misc_feature (1367)..(1367): n is a, c, g, or t
  misc_feature (1373)..(1376): n is a, c, g, or t
  misc_feature (1381)..(1382): n is a, c, g, or t
  misc_feature (1384)..(1384): n is a, c, g, or t
  misc_feature (1386)..(1386): n is a, c, g, or t
  misc_feature (1388)..(1388): n is a, c, g, or t
  misc_feature (1391)..(1392): n is a, c, g, or t
  misc_feature (1394)..(1394): n is a, c, g, or t
  misc_feature (1400)..(1402): n is a, c, g, or t
  misc_feature (1405)..(1405): n is a, c, g, or t
  misc_feature (1411)..(1411): n is a, c, g, or t
  misc_feature (1417)..(1418): n is a, c, g, or t
  misc_feature (1420)..(1420): n is a, c, g, or t
  misc_feature (1425)..(1425): n is a, c, g, or t
  misc_feature (1432)..(1432): n is a, c, g, or t
  misc_feature (1435)..(1436): n is a, c, g, or t
  misc_feature (1438)..(1440): n is a, c, g, or t
  misc_feature (1443)..(1444): n is a, c, g, or t
  misc_feature (1446)..(1446): n is a, c, g, or t
  misc_feature (1448)..(1448): n is a, c, g, or t
  misc_feature (1458)..(1458): n is a, c, g, or t
  misc_feature (1465)..(1466): n is a, c, g, or t
  misc_feature (1470)..(1472): n is a, c, g, or t
  misc_feature (1479)..(1479): n is a, c, g, or t
  misc_feature (1483)..(1483): n is a, c, g, or t
  misc_feature (1485)..(1486): n is a, c, g, or t
  misc_feature (1491)..(1492): n is a, c, g, or t
  misc_feature (1494)..(1494): n is a, c, g, or t
  misc_feature (1496)..(1496): n is a, c, g, or t
  misc_feature (1503)..(1503): n is a, c, g, or t
  misc_feature (1506)..(1506): n is a, c, g, or t
  misc_feature (1508)..(1508): n is a, c, g, or t
  misc_feature (1516)..(1516): n is a, c, g, or t
  misc_feature (1518)..(1518): n is a, c, g, or t
  misc_feature (1521)..(1521): n is a, c, g, or t
  misc_feature (1526)..(1526): n is a, c, g, or t
  misc_feature (1530)..(1531): n is a, c, g, or t
  misc_feature (1534)..(1535): n is a, c, g, or t
  misc_feature (1541)..(1541): n is a, c, g, or t
  misc_feature (1551)..(1551): n is a, c, g, or t
  misc_feature (1553)..(1553): n is a, c, g, or t
  misc_feature (1558)..(1558): n is a, c, g, or t
  misc_feature (1578)..(1578): n is a, c, g, or t
  misc_feature (1580)..(1581): n is a, c, g, or t
  misc_feature (1583)..(1585): n is a, c, g, or t
  misc_feature (1587)..(1587): n is a, c, g, or t
  misc_feature (1594)..(1594): n is a, c, g, or t
  misc_feature (1597)..(1597): n is a, c, g, or t
  misc_feature (1599)..(1600): n is a, c, g, or t
annaacatanagnaantaactatgagaggatcgcatcacccctcactcatcacggatcctatttnggtgncactatanaatcgtcgacccacgcgctccggagggtggggggtgtgngaatggtaccactnatnctgcnggntgnnctnannggggacgggggcacancacagccagaccnccaccagantnaggcccatggtgtgcngccaganncgngcntcnaaaaaaccnantaccagcnctgantttctggnntnaaacaccggcccntgttccntgtcaganatncanannctnaagcctgnctgnnnnctctngncgctcntcggnatttgcactgtgttgnnaagtnanatgnagtngaccnttgacganaaatnatcnngcanaaananggannaactttcctctgggcngnaacactcatanntgnnncngcnaggnncgcnntnccttgnaccacgntggtganngacantnaccntgtncaaaacctcccntagaatgaaggntcnttngggcattcacncnnaatannanctnctcgttaaccaacnttaantncgaccacnagtncnancnnntntggntattggnctttgaatatcccngncttnaaccnaannctntaatctgggtttnagacncattttanncntttatcnacctattngtnnaaccnnttcaannncntgtatatnanaannnttcnnnctncaanaaanctaccncnannnntnganatttcccnccntnacttganaaantcntgnncntnggcnctcagtacnnctagtcatttngantngngnnantagctatcntctccnncnnacnntatgtncnnnannnntttnnncatntananntnttntnntnnntcncncaagtannngttacnnnttnctnttananaantcccnnnntttncnnantnnntnnanaanananactcnntcctnnnaananagggttgnatcatttnntanngcnnnnnatnnnatannnaggatnganaaanncattntnanacatntgcnnantantnanatcnaagnaactntncnaataagtcancnnnantagatcttgnaagtncccnnannnccttntnntttntcttnnngncaannacannannctnttntntnctanttttncnnaccancntantatncnntanaatncttanatntantntantcccttcgntnctaanntcctacngtnttatnnanaataanctntnatntncattnnannnannttntntncncnatnnatccttcctncnnnntananttnatncntnntttnntnctcnnancataatgttaantnncnnacagtttntatctntcncntccttnnnnaaccnnantnancanncntcatannnttncaattnttaaanntnaattncttactnctnncnnnctnntncntcttttagcntcacctnntgtnnntataaanatanannatttnncntncctcctnttntngatttccntncanactgntccnnccnnattctncacaatatcnancctgngtatctatattccattcaantnnannncnaaaatantantnntg

SEQ ID NO: 861 - DNA, 1389 bp, Homo Sapiens
  misc_feature (2)..(10): n is a, c, g, or t
  misc_feature (21)..(21): n is a, c, g, or t
  misc_feature (685)..(685): n is a, c, g, or t
  misc_feature (712)..(712): n is a, c, g, or t
  misc_feature (714)..(714): n is a, c, g, or t
  misc_feature (762)..(762): n is a, c, g, or t
  misc_feature (796)..(796): n is a, c, g, or t
  misc_feature (803)..(803): n is a, c, g, or t
  misc_feature (810)..(810): n is a, c, g, or t
  misc_feature (813)..(813): n is a, c, g, or t
  misc_feature (818)..(818): n is a, c, g, or t
  misc_feature (836)..(836): n is a, c, g, or t
  misc_feature (860)..(860): n is a, c, g, or t
  misc_feature (864)..(864): n is a, c, g, or t
  misc_feature (867)..(867): n is a, c, g, or t
  misc_feature (869)..(869): n is a, c, g, or t
  misc_feature (881)..(881): n is a, c, g, or t
  misc_feature (885)..(885): n is a, c, g, or t
  misc_feature (890)..(890): n is a, c, g, or t
  misc_feature (895)..(895): n is a, c, g, or t
  misc_feature (902)..(903): n is a, c, g, or t
  misc_feature (907)..(907): n is a, c, g, or t
  misc_feature (916)..(916): n is a, c, g, or t
  misc_feature (918)..(918): n is a, c, g, or t
  misc_feature (925)..(925): n is a, c, g, or t
  misc_feature (941)..(941): n is a, c, g, or t
  misc_feature (957)..(957): n is a, c, g, or t
  misc_feature (962)..(962): n is a, c, g, or t
  misc_feature (965)..(965): n is a, c, g, or t
  misc_feature (972)..(972): n is a, c, g, or t
  misc_feature (976)..(976): n is a, c, g, or t
  misc_feature (983)..(983): n is a, c, g, or t
  misc_feature (987)..(987): n is a, c, g, or t
  misc_feature (999)..(999): n is a, c, g, or t
  misc_feature (1001)..(1001): n is a, c, g, or t
  misc_feature (1004)..(1004): n is a, c, g, or t
  misc_feature (1006)..(1008): n is a, c, g, or t
  misc_feature (1016)..(1016): n is a, c, g, or t
  misc_feature (1021)..(1021): n is a, c, g, or t
  misc_feature (1027)..(1027): n is a, c, g, or t
  misc_feature (1034)..(1034): n is a, c, g, or t
  misc_feature (1037)..(1037): n is a, c, g, or t
  misc_feature (1039)..(1040): n is a, c, g, or t
  misc_feature (1043)..(1043): n is a, c, g, or t
  misc_feature (1046)..(1046): n is a, c, g, or t
  misc_feature (1049)..(1049): n is a, c, g, or t
  misc_feature (1066)..(1066): n is a, c, g, or t
  misc_feature (1069)..(1069): n is a, c, g, or t
  misc_feature (1074)..(1074): n is a, c, g, or t
  misc_feature (1084)..(1086): n is a, c, g, or t
  misc_feature (1088)..(1088): n is a, c, g, or t
  misc_feature (1092)..(1092): n is a, c, g, or t
  misc_feature (1095)..(1095): n is a, c, g, or t
  misc_feature (1102)..(1102): n is a, c, g, or t
  misc_feature (1105)..(1105): n is a, c, g, or t
  misc_feature (1109)..(1109): n is a, c, g, or t
  misc_feature (1114)..(1114): n is a, c, g, or t
  misc_feature (1120)..(1120): n is a, c, g, or t
  misc_feature (1125)..(1125): n is a, c, g, or t
  misc_feature (1128)..(1128): n is a, c, g, or t
  misc_feature (1130)..(1130): n is a, c, g, or t
  misc_feature (1132)..(1132): n is a, c, g, or t
  misc_feature (1136)..(1136): n is a, c, g, or t
  misc_feature (1140)..(1140): n is a, c, g, or t
  misc_feature (1144)..(1147): n is a, c, g, or t
  misc_feature (1149)..(1150): n is a, c, g, or t
  misc_feature (1155)..(1157): n is a, c, g, or t
  misc_feature (1159)..(1160): n is a, c, g, or t
  misc_feature (1162)..(1162): n is a, c, g, or t
  misc_feature (1164)..(1164): n is a, c, g, or t
  misc_feature (1167)..(1168): n is a, c, g, or t
  misc_feature (1170)..(1170): n is a, c, g, or t
  misc_feature (1172)..(1172): n is a, c, g, or t
  misc_feature (1176)..(1177): n is a, c, g, or t
  misc_feature (1181)..(1181): n is a, c, g, or t
  misc_feature (1193)..(1194): n is a, c, g, or t
  misc_feature (1203)..(1203): n is a, c, g, or t
  misc_feature (1207)..(1207): n is a, c, g, or t
  misc_feature (1213)..(1213): n is a, c, g, or t
  misc_feature (1217)..(1217): n is a, c, g, or t
  misc_feature (1223)..(1223): n is a, c, g, or t
  misc_feature (1233)..(1233): n is a, c, g, or t
  misc_feature (1236)..(1236): n is a, c, g, or t
  misc_feature (1248)..(1248): n is a, c, g, or t
  misc_feature (1251)..(1251): n is a, c, g, or t
  misc_feature (1253)..(1253): n is a, c, g, or t
  misc_feature (1258)..(1258): n is a, c, g, or t
  misc_feature (1273)..(1274): n is a, c, g, or t
  misc_feature (1278)..(1278): n is a, c, g, or t
  misc_feature (1283)..(1283): n is a, c, g, or t
  misc_feature (1287)..(1287): n is a, c, g, or t
  misc_feature (1296)..(1296): n is a, c, g, or t
  misc_feature (1299)..(1299): n is a, c, g, or t
  misc_feature (1306)..(1306): n is a, c, g, or t
  misc_feature (1314)..(1314): n is a, c, g, or t
  misc_feature (1319)..(1319): n is a, c, g, or t
  misc_feature (1330)..(1330): n is a, c, g, or t
  misc_feature (1333)..(1334): n is a, c, g, or t
  misc_feature (1337)..(1337): n is a, c, g, or t
  misc_feature (1347)..(1348): n is a, c, g, or t
  misc_feature (1351)..(1351): n is a, c, g, or t
  misc_feature (1361)..(1361): n is a, c, g, or t
  misc_feature (1363)..(1363): n is a, c, g, or t
  misc_feature (1367)..(1368): n is a, c, g, or t
  misc_feature (1377)..(1378): n is a, c, g, or t
  misc_feature (1380)..(1380): n is a, c, g, or t
  misc_feature (1388)..(1388): n is a, c, g, or t
cnnnnnnnnnccaatagaganaattaactatgagaggatcgcatcaccatcaccagtcacggatcctatttaggtgacactatagaatcgtcgacccacgcgtccggccgcagcggcgatggcggcagcggcaggtggaggggctggcgcggcccgctccctctcgcgcttccgaggctgcctggctggcgcgctgctcggggactgcgtgggctccttctacgaggcccacgacaccgtcgacctgacgtcagtcctgcgtcatgtccagagtctggagccggaccccggcacgcccgggagtgagcggacagaagccttgtactacacagatgacacagccatggccagggccctggtgcagtccctgctagccaaggaggcctttgacgaggtggacatggctcacagatttgctcaggagtacaagaaagaccctgacaggggctatggtgctggagtagtcactgtcttcaagaagctcctgaaccccaaatgtcgcgatgtctttgagcctgcccgggcccagtttaacgggaaaggctcctatggcaatggaggtgccatgcgggtggctggcatctccctggcctatagcagtgtccaggatgtgcagaagtttgcccggctctcggcccagctgacacacgcctcctccctgggttacaatggcgccatcctgcangccctggctgtgcacctggccttgcangncgagtcttccagcgagcactttctcaagcaactcctgggccacatggnaggatctggaaggtgatgcccagtccgttcttgnatgccangtagttnggncatgnaaggaaccgttccataantccaagcccgccctgaaaaaaaanttgnaanangctttcttaganccangcatncggtngaccaanngaangaaagttgntngtttgancctaagggaaatggcnatttgctgcccttttnaaatncgnttacccnaccncccatcnaaangttttccctaangnttnannngaacccanacccntgaaantcccttnttncnnttnatnaancctcccaaaagaaattnttnttttnatctccaacnnncntttnggnggggaanaanaaancccanttttcnacccntgngntngggncccntttnnnngnnccccnnnanngngnaannantnaagnntccnaaaaaattttgnnacaacaaantttntaaagntttncaaagnaaaaaaaatntcnttttcccaaatnctntnacctnttttttccaaaaaannttanaaagntctnacctttttnggncttcccnaagtcccnttggnaaaaaataaantcnncanttaaaaaacnngcnttttaaagangngatnnccctttttnnantttaaaana

SEQ ID NO: 862 - DNA, 1199 bp, Homo Sapiens
  misc_feature (791)..(791): n is a, c, g, or t
  misc_feature (794)..(794): n is a, c, g, or t
  misc_feature (836)..(836): n is a, c, g, or t
  misc_feature (847)..(847): n is a, c, g, or t
  misc_feature (863)..(863): n is a, c, g, or t
  misc_feature (878)..(878): n is a, c, g, or t
  misc_feature (882)..(882): n is a, c, g, or t
  misc_feature (888)..(888): n is a, c, g, or t
  misc_feature (893)..(893): n is a, c, g, or t
  misc_feature (896)..(896): n is a, c, g, or t
  misc_feature (899)..(899): n is a, c, g, or t
  misc_feature (904)..(904): n is a, c, g, or t
  misc_feature (911)..(912): n is a, c, g, or t
  misc_feature (917)..(917): n is a, c, g, or t
  misc_feature (923)..(923): n is a, c, g, or t
  misc_feature (927)..(927): n is a, c, g, or t
  misc_feature (931)..(931): n is a, c, g, or t
  misc_feature (944)..(944): n is a, c, g, or t
  misc_feature (949)..(949): n is a, c, g, or t
  misc_feature (951)..(951): n is a, c, g, or t
  misc_feature (956)..(956): n is a, c, g, or t
  misc_feature (974)..(974): n is a, c, g, or t
  misc_feature (992)..(992): n is a, c, g, or t
  misc_feature (997)..(997): n is a, c, g, or t
  misc_feature (1001)..(1001): n is a, c, g, or t
  misc_feature (1022)..(1022): n is a, c, g, or t
  misc_feature (1025)..(1025): n is a, c, g, or t
  misc_feature (1029)..(1029): n is a, c, g, or t
  misc_feature (1032)..(1032): n is a, c, g, or t
  misc_feature (1054)..(1055): n is a, c, g, or t
  misc_feature (1068)..(1068): n is a, c, g, or t
  misc_feature (1071)..(1071): n is a, c, g, or t
  misc_feature (1076)..(1076): n is a, c, g, or t
  misc_feature (1080)..(1081): n is a, c, g, or t
  misc_feature (1084)..(1086): n is a, c, g, or t
  misc_feature (1089)..(1090): n is a, c, g, or t
  misc_feature (1093)..(1093): n is a, c, g, or t
  misc_feature (1099)..(1100): n is a, c, g, or t
  misc_feature (1103)..(1103): n is a, c, g, or t
  misc_feature (1105)..(1106): n is a, c, g, or t
  misc_feature (1118)..(1119): n is a, c, g, or t
  misc_feature (1123)..(1124): n is a, c, g, or t
  misc_feature (1137)..(1137): n is a, c, g, or t
  misc_feature (1142)..(1142): n is a, c, g, or t
  misc_feature (1149)..(1149): n is a, c, g, or t
  misc_feature (1158)..(1161): n is a, c, g, or t
  misc_feature (1166)..(1169): n is a, c, g, or t
  misc_feature (1172)..(1172): n is a, c, g, or t
  misc_feature (1174)..(1174): n is a, c, g, or t
  misc_feature (1182)..(1182): n is a, c, g, or t
  misc_feature (1184)..(1184): n is a, c, g, or t
  misc_feature (1187)..(1187): n is a, c, g, or t
  misc_feature (1189)..(1191): n is a, c, g, or t
  misc_feature (1197)..(1197): n is a, c, g, or t
aatagagaaattactatgagaggatcgcatcaccatcaccatcacggatcctatttaggtgacactatagaatcgtcgacccacgcgtccgcgcaccacctcggggaggagccagggcggggcctgaccccacaaagctttagttcccccggggagaggctggggacaagctacccattctggggtatgacacctatcagcacgtgtgagcccgccctgtgcccggcccacttctgcttcctcttagcgcaggaggggtcccgcactgggaggggccctcacagcctaccccgctagctttctgcctgatggtgagcttgccccgttgttcgccgccatctttcgcctttgcctgacagctcaggtagggcgacgtctccccccagctcagccccaggcagaagtcaggcccgctctgcacctcgtgctgtgcctggcccgtgtgttcccctcacagtgacgcacagccgtcctgtggggagggagggctctgggaaaagacccccttcttgagtgttccccatcggtttgtccccagggctgcgctggcctcggcacaccagtgccacccgctgccccggacgctgagcgtcctgaagagcacgccgcaggtacggggcatgcacaccatcatcagggacaaggagaccagtcgcgacgagttcatcttctactccaagagactgatgcggctgctcatcgagcacgcgctctccttcctgccctttcaggactgcgtcgtacagaccccgcaggggcaggactatgcgggcaagtgctatgcggggaancanatcaccggtgtgtccattctgcgcgccggtgaaaccatggancccgcgctgcncgctgtgtgcaaaaangtgcgcatcggcacnatcntcatcnaaacnaancancttancggggannccganctccantacntgangctgcccaagganatcancnatgancacgtgatcctcatggantgcaccgtgtccacgggngcggnggcnatgatggcatgcgcgtgctcntgnacanaantgcctgaagaaaaaattttttnntgtccctgctcanggnaaaangggnnggnnntcnnggnctatgnnttncnnaaagaaaatatnnccanngggggggaaaaanggggnaaaaaantttttcccnnnnccccnnnnttngnaaatttgngnacncnnnttttgnaa

SEQ ID NO: 863 - DNA, 1396 bp, Homo Sapiens
  misc_feature (10)..(10): n is a, c, g, or t
  misc_feature (12)..(12): n is a, c, g, or t
  misc_feature (691)..(691): n is a, c, g, or t
  misc_feature (742)..(742): n is a, c, g, or t
  misc_feature (838)..(838): n is a, c, g, or t
  misc_feature (866)..(866): n is a, c, g, or t
  misc_feature (872)..(872): n is a, c, g, or t
  misc_feature (875)..(875): n is a, c, g, or t
  misc_feature (882)..(882): n is a, c, g, or t
  misc_feature (899)..(899): n is a, c, g, or t
  misc_feature (905)..(906): n is a, c, g, or t
  misc_feature (914)..(914): n is a, c, g, or t
  misc_feature (924)..(924): n is a, c, g, or t
  misc_feature (934)..(934): n is a, c, g, or t
  misc_feature (948)..(948): n is a, c, g, or t
  misc_feature (961)..(961): n is a, c, g, or t
  misc_feature (967)..(967): n is a, c, g, or t
  misc_feature (972)..(972): n is a, c, g, or t
  misc_feature (985)..(986): n is a, c, g, or t
  misc_feature (989)..(990): n is a, c, g, or t
  misc_feature (995)..(995): n is a, c, g, or t
  misc_feature (997)..(997): n is a, c, g, or t
  misc_feature (999)..(999): n is a, c, g, or t
  misc_feature (1009)..(1009): n is a, c, g, or t
  misc_feature (1018)..(1018): n is a, c, g, or t
  misc_feature (1023)..(1024): n is a, c, g, or t
  misc_feature (1027)..(1027): n is a, c, g, or t
  misc_feature (1040)..(1041): n is a, c, g, or t
  misc_feature (1043)..(1043): n is a, c, g, or t
  misc_feature (1051)..(1052): n is a, c, g, or t
  misc_feature (1059)..(1059): n is a, c, g, or t
  misc_feature (1063)..(1063): n is a, c, g, or t
  misc_feature (1065)..(1065): n is a, c, g, or t
  misc_feature (1074)..(1075): n is a, c, g, or t
  misc_feature (1080)..(1080): n is a, c, g, or t
  misc_feature (1085)..(1085): n is a, c, g, or t
  misc_feature (1088)..(1088): n is a, c, g, or t
  misc_feature (1090)..(1091): n is a, c, g, or t
  misc_feature (1101)..(1101): n is a, c, g, or t
  misc_feature (1107)..(1107): n is a, c, g, or t
  misc_feature (1112)..(1112): n is a, c, g, or t
  misc_feature (1121)..(1121): n is a, c, g, or t
  misc_feature (1125)..(1125): n is a, c, g, or t
  misc_feature (1128)..(1128): n is a, c, g, or t
  misc_feature (1132)..(1133): n is a, c, g, or t
  misc_feature (1137)..(1137): n is a, c, g, or t
  misc_feature (1143)..(1143): n is a, c, g, or t
  misc_feature (1151)..(1154): n is a, c, g, or t
  misc_feature (1156)..(1156): n is a, c, g, or t
  misc_feature (1159)..(1159): n is a, c, g, or t
  misc_feature (1175)..(1176): n is a, c, g, or t
  misc_feature (1179)..(1179): n is a, c, g, or t
  misc_feature (1182)..(1182): n is a, c, g, or t
  misc_feature (1185)..(1185): n is a, c, g, or t
  misc_feature (1203)..(1203): n is a, c, g, or t
  misc_feature (1210)..(1210): n is a, c, g, or t
  misc_feature (1213)..(1214): n is a, c, g, or t
  misc_feature (1216)..(1216): n is a, c, g, or t
  misc_feature (1219)..(1225): n is a, c, g, or t
  misc_feature (1230)..(1230): n is a, c, g, or t
  misc_feature (1232)..(1232): n is a, c, g, or t
  misc_feature (1234)..(1240): n is a, c, g, or t
  misc_feature (1247)..(1248): n is a, c, g, or t
  misc_feature (1250)..(1251): n is a, c, g, or t
  misc_feature (1255)..(1256): n is a, c, g, or t
  misc_feature (1260)..(1261): n is a, c, g, or t
  misc_feature (1263)..(1264): n is a, c, g, or t
  misc_feature (1268)..(1269): n is a, c, g, or t
  misc_feature (1274)..(1274): n is a, c, g, or t
  misc_feature (1282)..(1283): n is a, c, g, or t
  misc_feature (1285)..(1288): n is a, c, g, or t
  misc_feature (1290)..(1290): n is a, c, g, or t
  misc_feature (1292)..(1295): n is a, c, g, or t
  misc_feature (1299)..(1299): n is a, c, g, or t
  misc_feature (1301)..(1305): n is a, c, g, or t
  misc_feature (1315)..(1315): n is a, c, g, or t
  misc_feature (1318)..(1322): n is a, c, g, or t
  misc_feature (1324)..(1324): n is a, c, g, or t
  misc_feature (1327)..(1327): n is a, c, g, or t
  misc_feature (1332)..(1332): n is a, c, g, or t
  misc_feature (1340)..(1345): n is a, c, g, or t
  misc_feature (1349)..(1355): n is a, c, g, or t
  misc_feature (1357)..(1359): n is a, c, g, or t
  misc_feature (1366)..(1366): n is a, c, g, or t
  misc_feature (1370)..(1374): n is a, c, g, or t
  misc_feature (1376)..(1376): n is a, c, g, or t
  misc_feature (1379)..(1385): n is a, c, g, or t
  misc_feature (1388)..(1389): n is a, c, g, or t
  misc_feature (1391)..(1394): n is a, c, g, or t
agtagattancnatgagaggatcgcatcaccatcaccatcacggatcctatttaggtgacactatagaatcgtcgacccacgcgtccgcccacgcgtccgcccacgcgtccgcccacgcgtccgctgcgcagtgcatcaccgcaggcgggcctcgcgggtccgggagcgcggcggagacgatgcctgagatcagagtcacgcccttgggggccggccaggacgtgggccgaagctgcatcctggtctccattgcgggcaagaatgtcatgctggactgtggaatgcacatgggcttcaatgacgaccgacgcttccctgacttctcctacatcacccagaacggccgcctaacagacttcctggactgtgtgatcattagccacttccacctggaccactgcggggcactcccctacttcagcgagatggtgggctacgacggccccatctacatgactcaccccacccaggccatctgccccatcttgctggaggactaccgcaagatcgccgtagacaagaagggcgaggccaacttcttcacctcccagatgatcaaagactgcatgaagaaggtggtggctgtccacctccaccagacggtccaggtagatgatgagctggagatcaaggcctactatgcaggccacgtgctgggggcagccatgttccagattaaagtgggctcanagtctgtggtctacacgggtgattataacatgaccccagaccgacacttangagctgcctggattgacaagtgccgccccaacctgctcatcacagagtccacgtacgccacgaccatccgtgactccaagcgctgccgggagcganacttcctgaaaaaaattccacaaaaccntggaancgnggtgggnaaggtgctgatacctgngttcgnnctgggccncgcccaaganctctgcatcntctggaaacctttnggggaacggaatnaaactnaaggngcccatctacttnntcnnggggntnancgaaaaaggncaaccctantacannttnttatcccctggannancaaaaaannccaaaantttngngaaagaaanngtttnatttnaanannttaggctttnaacggnttttntaaaaccanaacnaangttnntttncccccnaaaagttnnnntnggnatccctgaaaatttcnnaanggncgnaaaaaaaaaaattttttncccggtntgnngnggnnnnnnncaaantntnnnnnnnaattaannanngggnngggnnannaaannggaanattttttnncnnnnancnnnntttntnnnnnaaaaaaattntgnnnnnanaanatttnaaaaaaannnnnntttnnnnnnnannnccccccntttnnnnnanaannnnnnnaanncnnnnaa

SEQ ID NO: 864 - DNA, 1365 bp, Homo Sapiens
  misc_feature (930)..(930): n is a, c, g, or t
  misc_feature (967)..(967): n is a, c, g, or t
  misc_feature (969)..(969): n is a, c, g, or t
  misc_feature (1001)..(1001): n is a, c, g, or t
  misc_feature (1009)..(1009): n is a, c, g, or t
  misc_feature (1039)..(1039): n is a, c, g, or t
  misc_feature (1047)..(1047): n is a, c, g, or t
  misc_feature (1050)..(1050): n is a, c, g, or t
  misc_feature (1060)..(1060): n is a, c, g, or t
  misc_feature (1062)..(1062): n is a, c, g, or t
  misc_feature (1071)..(1071): n is a, c, g, or t
  misc_feature (1079)..(1079): n is a, c, g, or t
  misc_feature (1084)..(1084): n is a, c, g, or t
  misc_feature (1093)..(1093): n is a, c, g, or t
  misc_feature (1112)..(1112): n is a, c, g, or t
  misc_feature (1131)..(1131): n is a, c, g, or t
  misc_feature (1137)..(1137): n is a, c, g, or t
  misc_feature (1142)..(1142): n is a, c, g, or t
  misc_feature (1153)..(1153): n is a, c, g, or t
  misc_feature (1160)..(1160): n is a, c, g, or t
  misc_feature (1169)..(1169): n is a, c, g, or t
  misc_feature (1188)..(1188): n is a, c, g, or t
  misc_feature (1192)..(1193): n is a, c, g, or t
  misc_feature (1196)..(1196): n is a, c, g, or t
  misc_feature (1204)..(1204): n is a, c, g, or t
  misc_feature (1207)..(1207): n is a, c, g, or t
  misc_feature (1224)..(1224): n is a, c, g, or t
  misc_feature (1230)..(1230): n is a, c, g, or t
  misc_feature (1235)..(1236): n is a, c, g, or t
  misc_feature (1244)..(1244): n is a, c, g, or t
  misc_feature (1247)..(1249): n is a, c, g, or t
  misc_feature (1251)..(1251): n is a, c, g, or t
  misc_feature (1254)..(1255): n is a, c, g, or t
  misc_feature (1269)..(1269): n is a, c, g, or t
  misc_feature (1274)..(1274): n is a, c, g, or t
  misc_feature (1277)..(1277): n is a, c, g, or t
  misc_feature (1285)..(1286): n is a, c, g, or t
  misc_feature (1294)..(1294): n is a, c, g, or t
  misc_feature (1298)..(1298): n is a, c, g, or t
  misc_feature (1300)..(1300): n is a, c, g, or t
  misc_feature (1303)..(1303): n is a, c, g, or t
  misc_feature (1311)..(1311): n is a, c, g, or t
  misc_feature (1319)..(1319): n is a, c, g, or t
  misc_feature (1322)..(1322): n is a, c, g, or t
  misc_feature (1324)..(1325): n is a, c, g, or t
  misc_feature (1334)..(1334): n is a, c, g, or t
  misc_feature (1336)..(1336): n is a, c, g, or t
  misc_feature (1351)..(1351): n is a, c, g, or t
  misc_feature (1357)..(1358): n is a, c, g, or t
  misc_feature (1361)..(1361): n is a, c, g, or t
  misc_feature (1365)..(1365): n is a, c, g, or t
attagagaaattactatgagaggatcgcatcaccatcaccatcacggatcctatttaggtgacactatagaatcgtcgacccacgcgtccggtgacagccctacaaagaaaatgagagtcgatgaatcagccctggctgcccaggcctacgctctgaaagaggagaatgacagtctccgctggcagctggatgcctacaggaatgaggtggagctgctgaaacaagaaaaagaacagcttttccgaacagaagaaaacctcaccaaggaccagcaactgcagtttctgcagcaaaccatgcaaggcatgcagcagcaattgctaaccatccaggaggagttaaacaacaaaaagtcagaattggaacaagcaaaggaagagcagtcccatacacaagcgttactaaaagtcctgcaggaacaattaaaaggtaccaaggaattggtcgagaccaatggccacagccatgaggattcaaatgaaatcaatgtgttgacagttgcattagtcaaccaagaccgagagaacaatattgagaaaagaagccaaggcttaaaatcagagaaagaagctctgctaataggtatcatatcaacgtttcttcacgtccatccttttggagccaacatagaatatctttggtcatacatgcagcagctggactccaagatatctgcaaatgaaatagaaatgcttttgatgaggctgccacgcatgttcaaacaggaattcacgggtgtgggagccacgctggaaaaaagatggaagttgtgtgcctttgaaggaattaaaactacctaactgcgaagagcaaagcatctctggaaatgaaaccatgtgaacctggccagggcggtgcgacggggaagcaggaggtgtggggttggtccagcacacaacctttgtggagccatcgaagcctgcctttanttatatctgtggcgttctcttgtaagtggaaatgtantngtgtaccagtttcttaaaataaccaagcttcntactgggnaaaaaaaaaaaaaaaaaaaaagggcggccnctccctanagngagtcgtatnancttaattanctgaactnggacncctgttganaaatcccgtaatgaccccnaaacccctctggatttttncaaacncccgntgcccccgggngtttttntggggaaancccagctacttggggaaantttnnggncttagganctnaatgggaaaaaatcccnggaatnccccnnttaatttnccnnngnccnnaaaaattttggggntttcnccntgcccagnnccaaaccnaccntnccnggaatttngccttttnaancnnaaaaaaaancnatttttccccttttntttttnnccngggn

SEQ ID NO: 865 - DNA, 1417 bp, Homo Sapiens
  misc_feature (960)..(960): n is a, c, g, or t
  misc_feature (968)..(968): n is a, c, g, or t
  misc_feature (1007)..(1007): n is a, c, g, or t
  misc_feature (1025)..(1025): n is a, c, g, or t
  misc_feature (1034)..(1034): n is a, c, g, or t
  misc_feature (1057)..(1057): n is a, c, g, or t
  misc_feature (1070)..(1070): n is a, c, g, or t
  misc_feature (1091)..(1092): n is a, c, g, or t
  misc_feature (1094)..(1094): n is a, c, g, or t
  misc_feature (1100)..(1100): n is a, c, g, or t
  misc_feature (1107)..(1107): n is a, c, g, or t
  misc_feature (1125)..(1125): n is a, c, g, or t
  misc_feature (1136)..(1136): n is a, c, g, or t
  misc_feature (1147)..(1147): n is a, c, g, or t
  misc_feature (1185)..(1185): n is a, c, g, or t
  misc_feature (1187)..(1187): n is a, c, g, or t
  misc_feature (1189)..(1189): n is a, c, g, or t
  misc_feature (1191)..(1191): n is a, c, g, or t
  misc_feature (1194)..(1194): n is a, c, g, or t
  misc_feature (1199)..(1199): n is a, c, g, or t
  misc_feature (1202)..(1202): n is a, c, g, or t
  misc_feature (1210)..(1210): n is a, c, g, or t
  misc_feature (1212)..(1212): n is a, c, g, or t
  misc_feature (1217)..(1217): n is a, c, g, or t
  misc_feature (1222)..(1222): n is a, c, g, or t
  misc_feature (1225)..(1225): n is a, c, g, or t
  misc_feature (1241)..(1241): n is a, c, g, or t
  misc_feature (1248)..(1248): n is a, c, g, or t
  misc_feature (1250)..(1250): n is a, c, g, or t
  misc_feature (1262)..(1262): n is a, c, g, or t
  misc_feature (1269)..(1270): n is a, c, g, or t
  misc_feature (1280)..(1280): n is a, c, g, or t
  misc_feature (1282)..(1283): n is a, c, g, or t
  misc_feature (1286)..(1286): n is a, c, g, or t
  misc_feature (1288)..(1288): n is a, c, g, or t
  misc_feature (1292)..(1292): n is a, c, g, or t
  misc_feature (1296)..(1296): n is a, c, g, or t
  misc_feature (1301)..(1303): n is a, c, g, or t
  misc_feature (1309)..(1309): n is a, c, g, or t
  misc_feature (1316)..(1316): n is a, c, g, or t
  misc_feature (1319)..(1319): n is a, c, g, or t
  misc_feature (1324)..(1324): n is a, c, g, or t
  misc_feature (1327)..(1329): n is a, c, g, or t
  misc_feature (1332)..(1332): n is a, c, g, or t
  misc_feature (1334)..(1334): n is a, c, g, or t
  misc_feature (1336)..(1336): n is a, c, g, or t
  misc_feature (1342)..(1343): n is a, c, g, or t
  misc_feature (1347)..(1348): n is a, c, g, or t
  misc_feature (1356)..(1356): n is a, c, g, or t
  misc_feature (1358)..(1358): n is a, c, g, or t
  misc_feature (1360)..(1360): n is a, c, g, or t
  misc_feature (1368)..(1368): n is a, c, g, or t
  misc_feature (1370)..(1371): n is a, c, g, or t
  misc_feature (1381)..(1381): n is a, c, g, or t
  misc_feature (1387)..(1387): n is a, c, g, or t
  misc_feature (1390)..(1391): n is a, c, g, or t
  misc_feature (1393)..(1393): n is a, c, g, or t
  misc_feature (1398)..(1398): n is a, c, g, or t
  misc_feature (1400)..(1400): n is a, c, g, or t
  misc_feature (1403)..(1405): n is a, c, g, or t
  misc_feature (1410)..(1411): n is a, c, g, or t
  misc_feature (1416)..(1416): n is a, c, g, or t
tagagaaattactatgagaggatcgcatcaccatcaccatcacggatcctatttaggtgacactatagaatcgtcgacccacgcgtccgaccggaccatcacagactttcgtgagaaactcaagcaccctgtcatgtctgtgtcttacaaggaagtggatcgctatgatgccccaggtattgccttgtaccccggtcaggcccagttgctcagctgtaagcaccattacgaggtcattcctcctctgacaagccctggccagccgggtgacatgaattgcaccacccagaggatcaactacacggaccccttctccaatcagactgtgaaatctgccctgattgtccaggggccccgggaagtgaaaaagcgggagctggtcttcctccagttccgcctgaacaagagtagtgaggacttcagcgccattgattacctcctcttctcttctttccaggagttcctgcaaagcccaaacagggtaggcttcatgcaggcctgtgagagtgcctattccagctggaagttctctgggggcttccgcacctgggtcaagatgtcactggtaaagaccaaggaggaggatgggcgggaagcagtggagttccggcaggagacaagtgtggttaactacattgaccagaggccagctgccaaaaaaagtgctcaattgttttttgtggtctttgaatggaaagatcctttcatccagaaagtccaagatatagtcactgccaatccttggaacacaattgctcttctctgtggcgccttcttggcattatttaaagcagcagagtttgccaaactgagtataaaatggatgatcaaaattagaaagagataccttaaaaagaagaggtcaggcaacgagccacataagctgaagtcacctcgcgttgtttagaaaactgtccacatcaatgggaagctgtcatcacttccactttgtaaacgganctatcaanaatcctgtactcacttgaaaaaatgggggcttgcttggnaggaacagcatgtaaaantggaacttntaaccccgtccaaaaaagggggngtaaaacctaaanaaaaaaaataatggaaaaccnnanaagttntttaaanttttaaaatattaaaaantttttaaaaantggccaagaanttttaaaaggtttgaaaaaaagcctttctccggttggncntngnatngaaanggnaacccccnanggaangaggnccntttttcttttaaaggnaaaaaangngtttttttttcnaaattcnnaataaaaaangnngtntntttngacnttccnnnaaaaanaaacccnaanttggnccnnncantngncccccnnaagnntttttttnantnaaaatttngnnaaaaaaaatntttttnggnnanccccntnccnnnagttnnaaaana

SEQ ID NO: 866 - DNA, 1338 bp, Homo Sapiens
  misc_feature (745)..(745): n is a, c, g, or t
  misc_feature (782)..(782): n is a, c, g, or t
  misc_feature (810)..(810): n is a, c, g, or t
  misc_feature (832)..(832): n is a, c, g, or t
  misc_feature (837)..(837): n is a, c, g, or t
  misc_feature (843)..(843): n is a, c, g, or t
  misc_feature (858)..(858): n is a, c, g, or t
  misc_feature (865)..(865): n is a, c, g, or t
  misc_feature (868)..(868): n is a, c, g, or t
  misc_feature (879)..(879): n is a, c, g, or t
  misc_feature (883)..(883): n is a, c, g, or t
  misc_feature (887)..(887): n is a, c, g, or t
  misc_feature (897)..(897): n is a, c, g, or t
  misc_feature (900)..(900): n is a, c, g, or t
  misc_feature (908)..(908): n is a, c, g, or t
  misc_feature (931)..(976): n is a, c, g, or t
  misc_feature (978)..(978): n is a, c, g, or t
  misc_feature (980)..(980): n is a, c, g, or t
  misc_feature (982)..(982): n is a, c, g, or t
  misc_feature (985)..(985): n is a, c, g, or t
  misc_feature (987)..(987): n is a, c, g, or t
  misc_feature (995)..(996): n is a, c, g, or t
  misc_feature (999)..(999): n is a, c, g, or t
  misc_feature (1001)..(1001): n is a, c, g, or t
  misc_feature (1004)..(1004): n is a, c, g, or t
  misc_feature (1011)..(1011): n is a, c, g, or t
  misc_feature (1015)..(1015): n is a, c, g, or t
  misc_feature (1020)..(1021): n is a, c, g, or t
  misc_feature (1024)..(1024): n is a, c, g, or t
  misc_feature (1034)..(1034): n is a, c, g, or t
  misc_feature (1041)..(1042): n is a, c, g, or t
  misc_feature (1044)..(1044): n is a, c, g, or t
  misc_feature (1049)..(1049): n is a, c, g, or t
  misc_feature (1053)..(1054): n is a, c, g, or t
  misc_feature (1058)..(1058): n is a, c, g, or t
  misc_feature (1061)..(1061): n is a, c, g, or t
  misc_feature (1078)..(1078): n is a, c, g, or t
  misc_feature (1089)..(1089): n is a, c, g, or t
  misc_feature (1096)..(1096): n is a, c, g, or t
  misc_feature (1099)..(1099): n is a, c, g, or t
  misc_feature (1101)..(1104): n is a, c, g, or t
  misc_feature (1113)..(1114): n is a, c, g, or t
  misc_feature (1122)..(1122): n is a, c, g, or t
  misc_feature (1128)..(1129): n is a, c, g, or t
  misc_feature (1131)..(1131): n is a, c, g, or t
  misc_feature (1137)..(1140): n is a, c, g, or t
  misc_feature (1142)..(1145): n is a, c, g, or t
  misc_feature (1147)..(1147): n is a, c, g, or t
  misc_feature (1151)..(1151): n is a, c, g, or t
  misc_feature (1158)..(1160): n is a, c, g, or t
  misc_feature (1163)..(1164): n is a, c, g, or t
  misc_feature (1166)..(1168): n is a, c, g, or t
  misc_feature (1170)..(1172): n is a, c, g, or t
  misc_feature (1174)..(1179): n is a, c, g, or t
  misc_feature (1182)..(1183): n is a, c, g, or t
  misc_feature (1189)..(1191): n is a, c, g, or t
  misc_feature (1194)..(1194): n is a, c, g, or t
  misc_feature (1197)..(1197): n is a, c, g, or t
  misc_feature (1199)..(1199): n is a, c, g, or t
  misc_feature (1201)..(1201): n is a, c, g, or t
  misc_feature (1208)..(1208): n is a, c, g, or t
  misc_feature (1210)..(1210): n is a, c, g, or t
  misc_feature (1214)..(1214): n is a, c, g, or t
  misc_feature (1220)..(1220): n is a, c, g, or t
  misc_feature (1222)..(1225): n is a, c, g, or t
  misc_feature (1227)..(1230): n is a, c, g, or t
  misc_feature (1234)..(1234): n is a, c, g, or t
  misc_feature (1238)..(1245): n is a, c, g, or t
  misc_feature (1247)..(1275): n is a, c, g, or t
  misc_feature (1277)..(1296): n is a, c, g, or t
  misc_feature (1298)..(1298): n is a, c, g, or t
  misc_feature (1301)..(1305): n is a, c, g, or t
  misc_feature (1307)..(1312): n is a, c, g, or t
  misc_feature (1315)..(1324): n is a, c, g, or t
  misc_feature (1326)..(1327): n is a, c, g, or t
  misc_feature (1331)..(1334): n is a, c, g, or t
atagagaaaattactatgagaggatcgcatcaccatcaccatcacggatcctatttaggtgacactatagaatcgtcgacccacgcgtccgagaatactttgtggcctgaagttcaaaaactatatgggcacggttatgaaatattttgtgttacttgtaacagttcaaagactctgcttgcctcagcttgtaaggcagctaagaaagagcatgcagctatcattctttggaacactacatcttggaaacaggtgcagaatttagttttccacagtttgacagtcacgcagatggccttctcacctaatgagaagttcttactagctgtttccagagatcgaacctggtcattgtggaaaaagcaggatacaatctcacctgagttcgagccagtttttagtctttttgccttcaccaacaaaattacttctgtgcacagtagaattatttggtcttgtgattggagtcctgacagcaagtatttcttcactgggagtcgagacaaaaaggtggttgtctggggtgagtgtgactccactgatgactgtattgagcacaacattggcccctgctcctcagtcctggacgtgggtggggctgtgacagctgtcagcgtctgcccagtgctccacccttctcaacgatacgtggttgcagtaggattggagtgtggaaagatttgcttatatacctggaaaaagactgatcaagttccagaaataaatgactggacccactgtgtanaaacaagtcaaagccaaagtcatacactggctatcanaaaattatgctggaagaattgcagtggnaaaactgaacagaaggaaacanaaggngctgantggttaccctttgcnaagctgnggngaaaaatcacnctgngaanatacccaaantcnataaatgngccctgaaatgggaaaaaaaaannnnnnnnnnnnnnnnnnnnnnnnnnnnnnnnnnnnnnnnnnnnnngncngnccncncccctaannggngnccnaataaancttnatttnnctnaacctggganccccggnnanaaaancccnnaaangancccccaaaccccccccnggaattttttnaaaaccnccngnnnncccccgggnntttttttntggggnnanaacccnnnncnnnntngggnaaatttnnnggnncnnngnnncnnnnnnggnnaaaaannnccnggnananccccccntnaaanccccangnnnncnnnnaaancttnnnnnnnntnnnnnnnnnnnnnnnnnnnnnnnnnnnnnannnnnnnnnnnnnnnnnnnncnttnnnnncnnnnnnaannnnnnnnnntnncccnnnntttt

SEQ ID NO: 867 - DNA, 1395 bp, Homo Sapiens
  misc_feature (825)..(825): n is a, c, g, or t
  misc_feature (829)..(829): n is a, c, g, or t
  misc_feature (863)..(863): n is a, c, g, or t
  misc_feature (867)..(867): n is a, c, g, or t
  misc_feature (869)..(869): n is a, c, g, or t
  misc_feature (878)..(878): n is a, c, g, or t
  misc_feature (896)..(896): n is a, c, g, or t
  misc_feature (917)..(917): n is a, c, g, or t
  misc_feature (919)..(919): n is a, c, g, or t
  misc_feature (932)..(932): n is a, c, g, or t
  misc_feature (939)..(939): n is a, c, g, or t
  misc_feature (941)..(941): n is a, c, g, or t
  misc_feature (945)..(946): n is a, c, g, or t
  misc_feature (948)..(948): n is a, c, g, or t
  misc_feature (982)..(982): n is a, c, g, or t
  misc_feature (997)..(997): n is a, c, g, or t
  misc_feature (1000)..(1000): n is a, c, g, or t
  misc_feature (1011)..(1011): n is a, c, g, or t
  misc_feature (1013)..(1014): n is a, c, g, or t
  misc_feature (1016)..(1016): n is a, c, g, or t
  misc_feature (1025)..(1025): n is a, c, g, or t
  misc_feature (1038)..(1038): n is a, c, g, or t
  misc_feature (1043)..(1043): n is a, c, g, or t
  misc_feature (1050)..(1050): n is a, c, g, or t
  misc_feature (1062)..(1062): n is a, c, g, or t
  misc_feature (1072)..(1072): n is a, c, g, or t
  misc_feature (1076)..(1077): n is a, c, g, or t
  misc_feature (1081)..(1081): n is a, c, g, or t
  misc_feature (1087)..(1087): n is a, c, g, or t
  misc_feature (1090)..(1090): n is a, c, g, or t
  misc_feature (1093)..(1094): n is a, c, g, or t
  misc_feature (1102)..(1102): n is a, c, g, or t
  misc_feature (1119)..(1120): n is a, c, g, or t
  misc_feature (1123)..(1124): n is a, c, g, or t
  misc_feature (1128)..(1128): n is a, c, g, or t
  misc_feature (1133)..(1133): n is a, c, g, or t
  misc_feature (1136)..(1137): n is a, c, g, or t
  misc_feature (1157)..(1157): n is a, c, g, or t
  misc_feature (1163)..(1163): n is a, c, g, or t
  misc_feature (1175)..(1176): n is a, c, g, or t
  misc_feature (1185)..(1185): n is a, c, g, or t
  misc_feature (1187)..(1187): n is a, c, g, or t
  misc_feature (1191)..(1191): n is a, c, g, or t
  misc_feature (1193)..(1194): n is a, c, g, or t
  misc_feature (1207)..(1207): n is a, c, g, or t
  misc_feature (1212)..(1212): n is a, c, g, or t
  misc_feature (1217)..(1218): n is a, c, g, or t
  misc_feature (1229)..(1231): n is a, c, g, or t
  misc_feature (1233)..(1234): n is a, c, g, or t
  misc_feature (1248)..(1248): n is a, c, g, or t
  misc_feature (1250)..(1251): n is a, c, g, or t
  misc_feature (1255)..(1255): n is a, c, g, or t
  misc_feature (1257)..(1257): n is a, c, g, or t
  misc_feature (1260)..(1260): n is a, c, g, or t
  misc_feature (1264)..(1264): n is a, c, g, or t
  misc_feature (1287)..(1287): n is a, c, g, or t
  misc_feature (1298)..(1298): n is a, c, g, or t
  misc_feature (1301)..(1302): n is a, c, g, or t
  misc_feature (1308)..(1308): n is a, c, g, or t
  misc_feature (1318)..(1319): n is a, c, g, or t
  misc_feature (1324)..(1327): n is a, c, g, or t
  misc_feature (1339)..(1340): n is a, c, g, or t
  misc_feature (1345)..(1345): n is a, c, g, or t
  misc_feature (1350)..(1350): n is a, c, g, or t
  misc_feature (1359)..(1360): n is a, c, g, or t
  misc_feature (1363)..(1363): n is a, c, g, or t
  misc_feature (1370)..(1370): n is a, c, g, or t
  misc_feature (1372)..(1372): n is a, c, g, or t
  misc_feature (1377)..(1377): n is a, c, g, or t
  misc_feature (1381)..(1381): n is a, c, g, or t
  misc_feature (1383)..(1383): n is a, c, g, or t
  misc_feature (1386)..(1386): n is a, c, g, or t
cgaatagagagaattactatgagaggatcgcatcaccatcaccatcacggatcctatttaggtgacactatagaatcgtcgacccacgcgtccgccgagggggtccttaccactaccttcagcgacgagggcaatctccgagaggtaacatattcccgaagcacaggggaaaacgaacaagttagtcgcagccagcaacgaggtctccggcgagtgagagacctttgtcgagttctgcagttgccaccaacatttgaggataccgcggttgcctactaccaacaggcatatcggcactctggcatccgagcggccaggctgcaaaagaaggaggtgttggttgggtgctgcgtcttaatcacctgccgacagcataactggcccctaacaatgggggccatctgcacgctgttgtatgcagatttggatgtgttttctagcacttacatgcagatagtgaagctcctgggactggatgtgccatctctgtgcttggcagaactggtgaagacctattgcagcagcttcaaactgttccaagcttcaccttctgtgccagccaaatacgtggaagacaaagagaagatgctgtctcgaacaatgcagttggtggagctggcaaatgagacgtggctggtgaccgggaggcatcccttgcccgtcatcactgctgcgactttcctggcttggcagtcgctgcagcctgcagatcggctttcatgttcccttgcccgattttgtaaattggcaaatgtggacctgccctacccggcgtcctcccgcctgcaggagctgctggctgtgctgctgcggatggctgaacanctgncctggttacgagttctgagacttgacaaaacggnctgngntgaagcacnatcggtgaccttctccancaccgcccagtcactggtccncnctgccttttcggnaggggananccannangtggaaaacccccaaaaaaaggaacccccggggntgggaacaggggctnagnaaaaagggaangnngnaaaataatnccttaaggtttanccccnaggaaancggcccggccanttcttgcccnttcnncttnccaccntgnctnnttgaaatnccccaaaacggaatttnnccnngganccccngtnnccccttgttcctggaaaaanaaaaanttttctaaaaannaaaaacccnantttncnnccccctcgaattnaggancttcnnaaaaccccggnnntnnaaaaggtccccaananncccnanccncccnaagaaatccactggaaacctccncccgttcgaanctnntaactnccttaaaacnnagggnnnnaccccccccacnntattnttttntataaaaannagngctcccncnttatnaccngnccncaaaaacaa

SEQ ID NO: 868 - DNA, 1378 bp, Homo Sapiens
  misc_feature (1)..(1): n is a, c, g, or t
  misc_feature (4)..(4): n is a, c, g, or t
  misc_feature (828)..(828): n is a, c, g, or t
  misc_feature (887)..(887): n is a, c, g, or t
  misc_feature (901)..(901): n is a, c, g, or t
  misc_feature (908)..(908): n is a, c, g, or t
  misc_feature (911)..(911): n is a, c, g, or t
  misc_feature (945)..(945): n is a, c, g, or t
  misc_feature (954)..(954): n is a, c, g, or t
  misc_feature (956)..(956): n is a, c, g, or t
  misc_feature (964)..(964): n is a, c, g, or t
  misc_feature (970)..(970): n is a, c, g, or t
  misc_feature (989)..(989): n is a, c, g, or t
  misc_feature (1016)..(1016): n is a, c, g, or t
  misc_feature (1019)..(1019): n is a, c, g, or t
  misc_feature (1047)..(1048): n is a, c, g, or t
  misc_feature (1078)..(1078): n is a, c, g, or t
  misc_feature (1093)..(1093): n is a, c, g, or t
  misc_feature (1100)..(1100): n is a, c, g, or t
  misc_feature (1118)..(1118): n is a, c, g, or t
  misc_feature (1124)..(1124): n is a, c, g, or t
  misc_feature (1147)..(1147): n is a, c, g, or t
  misc_feature (1152)..(1152): n is a, c, g, or t
  misc_feature (1154)..(1154): n is a, c, g, or t
  misc_feature (1157)..(1157): n is a, c, g, or t
  misc_feature (1160)..(1160): n is a, c, g, or t
  misc_feature (1162)..(1162): n is a, c, g, or t
  misc_feature (1166)..(1169): n is a, c, g, or t
  misc_feature (1172)..(1172): n is a, c, g, or t
  misc_feature (1176)..(1176): n is a, c, g, or t
  misc_feature (1182)..(1182): n is a, c, g, or t
  misc_feature (1187)..(1187): n is a, c, g, or t
  misc_feature (1195)..(1195): n is a, c, g, or t
  misc_feature (1198)..(1199): n is a, c, g, or t
  misc_feature (1203)..(1204): n is a, c, g, or t
  misc_feature (1206)..(1206): n is a, c, g, or t
  misc_feature (1222)..(1222): n is a, c, g, or t
  misc_feature (1228)..(1228): n is a, c, g, or t
  misc_feature (1230)..(1230): n is a, c, g, or t
  misc_feature (1233)..(1236): n is a, c, g, or t
  misc_feature (1239)..(1239): n is a, c, g, or t
  misc_feature (1242)..(1242): n is a, c, g, or t
  misc_feature (1245)..(1246): n is a, c, g, or t
  misc_feature (1248)..(1248): n is a, c, g, or t
  misc_feature (1253)..(1253): n is a, c, g, or t
  misc_feature (1257)..(1259): n is a, c, g, or t
  misc_feature (1261)..(1261): n is a, c, g, or t
  misc_feature (1264)..(1264): n is a, c, g, or t
  misc_feature (1268)..(1268): n is a, c, g, or t
  misc_feature (1271)..(1271): n is a, c, g, or t
  misc_feature (1273)..(1274): n is a, c, g, or t
  misc_feature (1283)..(1283): n is a, c, g, or t
  misc_feature (1290)..(1290): n is a, c, g, or t
  misc_feature (1294)..(1294): n is a, c, g, or t
  misc_feature (1297)..(1298): n is a, c, g, or t
  misc_feature (1300)..(1300): n is a, c, g, or t
  misc_feature (1314)..(1314): n is a, c, g, or t
  misc_feature (1316)..(1316): n is a, c, g, or t
  misc_feature (1318)..(1318): n is a, c, g, or t
  misc_feature (1321)..(1321): n is a, c, g, or t
  misc_feature (1332)..(1332): n is a, c, g, or t
  misc_feature (1347)..(1347): n is a, c, g, or t
  misc_feature (1350)..(1350): n is a, c, g, or t
  misc_feature (1356)..(1358): n is a, c, g, or t
  misc_feature (1360)..(1360): n is a, c, g, or t
  misc_feature (1363)..(1363): n is a, c, g, or t
  misc_feature (1377)..(1377): n is a, c, g, or t
ntantagagaaattactatgagaggatcgcatcaccatcaccatcacggatcctatttaggtgacactatagaatcgtcgacccacgcgtccggtgctagtgccttcttttgggattgttgccccccgggtctttaccgagttgggaactgtgatggcatcgggaccagtcctgggcgccctgagaccactcgctgctctcaccctctgcagacgccccacccgctcggtcctggacacactgcccccctctcttgcctccacccctctgcggactctgcagctccgcggccccggcgcagggagagggagggcacgggcgcgggccgggcctcaagggacttgcccagcccacaccaggtcgcgcaccggcgatttctcctgtagaacaaagaaggaaatagagggaccgagaggggtgggactcgaacccaagtctcccactcatctcaccccaccccaccccactccaccccaccccacccctccactccactccactccacacatcccatccagccagccttttctgcctgctggtgcctcggccgctgtccgagccccgccccgcgggcttgcacgtggcccccgcctgacccggcgccccggggcggagtagggcggagcgggcggcaaacgcagcactttccgcggctttgacgagcccgcagcggccgggcccgagcgcagagccgggccgagactgcaccatgcaggaagcgccagctgcgctgcccacggagccaggccccagccccgtgcctgccttcctcggcaagctatgggcgctggtgggggacccaggcacagaccacctgatccgctggancccggtgagggccggggcccctcaattccccctgtggtcccggggtccctccacgtcantgaacacccaatgncccgccnaanccccctcctggaaactggggccgtggaatccccnggatttggncnattcaaanaaattncacctttgaaagggggtgngccaaaaaggggggtttccttctgcgnccnaaaaaaggttaagaaacctggccttttnnaaaacttaaagatccaagggaaacttttanggcatttaatttccnaccctancccaatcgaaaaaaaggnaaaaanaaaagcccgggaaaaagggaaanggttngntcnaantnaagnnnnaanttgngggggntgggnaaaccccntanncctnncntttttaaaaataaaanggaatncnggnnnnggntgnggnnangaatnctgnnncnccncagnaancnnaaaaccctntttggcngccnaannanttcccgaaaagggngncntancaaaaaaaaanaatttttcccccctnaanaaaaannncnganggggaccctccccng

SEQ ID NO: 869 - DNA, 1325 bp, Homo Sapiens
  misc_feature (1)..(4): n is a, c, g, or t
  misc_feature (6)..(7): n is a, c, g, or t
  misc_feature (9)..(9): n is a, c, g, or t
  misc_feature (13)..(13): n is a, c, g, or t
  misc_feature (463)..(463): n is a, c, g, or t
  misc_feature (487)..(487): n is a, c, g, or t
  misc_feature (512)..(512): n is a, c, g, or t
  misc_feature (518)..(518): n is a, c, g, or t
  misc_feature (533)..(533): n is a, c, g, or t
  misc_feature (538)..(538): n is a, c, g, or t
  misc_feature (593)..(593): n is a, c, g, or t
  misc_feature (598)..(598): n is a, c, g, or t
  misc_feature (647)..(647): n is a, c, g, or t
  misc_feature (676)..(676): n is a, c, g, or t
  misc_feature (679)..(679): n is a, c, g, or t
  misc_feature (693)..(693): n is a, c, g, or t
  misc_feature (710)..(710): n is a, c, g, or t
  misc_feature (715)..(715): n is a, c, g, or t
  misc_feature (718)..(718): n is a, c, g, or t
  misc_feature (721)..(721): n is a, c, g, or t
  misc_feature (727)..(727): n is a, c, g, or t
  misc_feature (733)..(733): n is a, c, g, or t
  misc_feature (754)..(754): n is a, c, g, or t
  misc_feature (762)..(762): n is a, c, g, or t
  misc_feature (774)..(774): n is a, c, g, or t
  misc_feature (788)..(788): n is a, c, g, or t
  misc_feature (795)..(795): n is a, c, g, or t
  misc_feature (799)..(799): n is a, c, g, or t
  misc_feature (803)..(803): n is a, c, g, or t
  misc_feature (810)..(810): n is a, c, g, or t
  misc_feature (841)..(842): n is a, c, g, or t
  misc_feature (847)..(847): n is a, c, g, or t
  misc_feature (854)..(854): n is a, c, g, or t
  misc_feature (860)..(860): n is a, c, g, or t
  misc_feature (863)..(863): n is a, c, g, or t
  misc_feature (865)..(865): n is a, c, g, or t
  misc_feature (867)..(867): n is a, c, g, or t
  misc_feature (869)..(869): n is a, c, g, or t
  misc_feature (872)..(872): n is a, c, g, or t
  misc_feature (874)..(874): n is a, c, g, or t
  misc_feature (876)..(876): n is a, c, g, or t
  misc_feature (883)..(883): n is a, c, g, or t
  misc_feature (890)..(890): n is a, c, g, or t
  misc_feature (895)..(897): n is a, c, g, or t
  misc_feature (909)..(909): n is a, c, g, or t
  misc_feature (915)..(915): n is a, c, g, or t
  misc_feature (917)..(917): n is a, c, g, or t
  misc_feature (924)..(924): n is a, c, g, or t
  misc_feature (929)..(929): n is a, c, g, or t
  misc_feature (932)..(932): n is a, c, g, or t
  misc_feature (937)..(937): n is a, c, g, or t
  misc_feature (943)..(943): n is a, c, g, or t
  misc_feature (947)..(947): n is a, c, g, or t
  misc_feature (959)..(959): n is a, c, g, or t
  misc_feature (969)..(969): n is a, c, g, or t
  misc_feature (971)..(971): n is a, c, g, or t
  misc_feature (980)..(980): n is a, c, g, or t
  misc_feature (982)..(982): n is a, c, g, or t
  misc_feature (987)..(988): n is a, c, g, or t
  misc_feature (991)..(992): n is a, c, g, or t
  misc_feature (994)..(994): n is a, c, g, or t
  misc_feature (1001)..(1002): n is a, c, g, or t
  misc_feature (1011)..(1012): n is a, c, g, or t
  misc_feature (1020)..(1020): n is a, c, g, or t
  misc_feature (1022)..(1022): n is a, c, g, or t
  misc_feature (1026)..(1026): n is a, c, g, or t
  misc_feature (1040)..(1040): n is a, c, g, or t
  misc_feature (1043)..(1043): n is a, c, g, or t
  misc_feature (1055)..(1055): n is a, c, g, or t
  misc_feature (1058)..(1058): n is a, c, g, or t
  misc_feature (1061)..(1061): n is a, c, g, or t
  misc_feature (1064)..(1065): n is a, c, g, or t
  misc_feature (1073)..(1073): n is a, c, g, or t
  misc_feature (1083)..(1083): n is a, c, g, or t
  misc_feature (1085)..(1086): n is a, c, g, or t
  misc_feature (1091)..(1092): n is a, c, g, or t
  misc_feature (1094)..(1094): n is a, c, g, or t
  misc_feature (1096)..(1096): n is a, c, g, or t
  misc_feature (1103)..(1103): n is a, c, g, or t
  misc_feature (1111)..(1112): n is a, c, g, or t
  misc_feature (1115)..(1116): n is a, c, g, or t
  misc_feature (1118)..(1118): n is a, c, g, or t
  misc_feature (1121)..(1121): n is a, c, g, or t
  misc_feature (1125)..(1126): n is a, c, g, or t
  misc_feature (1132)..(1133): n is a, c, g, or t
  misc_feature (1152)..(1152): n is a, c, g, or t
  misc_feature (1160)..(1160): n is a, c, g, or t
  misc_feature (1164)..(1165): n is a, c, g, or t
  misc_feature (1167)..(1168): n is a, c, g, or t
  misc_feature (1181)..(1181): n is a, c, g, or t
  misc_feature (1183)..(1183): n is a, c, g, or t
  misc_feature (1195)..(1195): n is a, c, g, or t
  misc_feature (1199)..(1199): n is a, c, g, or t
  misc_feature (1202)..(1203): n is a, c, g, or t
  misc_feature (1205)..(1205): n is a, c, g, or t
  misc_feature (1208)..(1209): n is a, c, g, or t
  misc_feature (1211)..(1211): n is a, c, g, or t
  misc_feature (1213)..(1213): n is a, c, g, or t
  misc_feature (1217)..(1218): n is a, c, g, or t
  misc_feature (1226)..(1229): n is a, c, g, or t
  misc_feature (1231)..(1231): n is a, c, g, or t
  misc_feature (1233)..(1233): n is a, c, g, or t
  misc_feature (1238)..(1238): n is a, c, g, or t
  misc_feature (1244)..(1245): n is a, c, g, or t
  misc_feature (1254)..(1254): n is a, c, g, or t
  misc_feature (1259)..(1259): n is a, c, g, or t
  misc_feature (1261)..(1262): n is a, c, g, or t
  misc_feature (1264)..(1264): n is a, c, g, or t
  misc_feature (1273)..(1273): n is a, c, g, or t
  misc_feature (1276)..(1276): n is a, c, g, or t
  misc_feature (1281)..(1281): n is a, c, g, or t
  misc_feature (1287)..(1287): n is a, c, g, or t
  misc_feature (1290)..(1290): n is a, c, g, or t
  misc_feature (1293)..(1293): n is a, c, g, or t
  misc_feature (1296)..(1296): n is a, c, g, or t
  misc_feature (1304)..(1304): n is a, c, g, or t
  misc_feature (1307)..(1307): n is a, c, g, or t
  misc_feature (1313)..(1313): n is a, c, g, or t
  misc_feature (1317)..(1317): n is a, c, g, or t
  misc_feature (1319)..(1319): n is a, c, g, or t
  misc_feature (1325)..(1325): n is a, c, g, or t
nnnnannanattnagagagaattactatgagaggatcgcatcaccatcaccatcacggatcctatttaggtgacactatagaatcgtcgacccacgcgtccgctccgtctgtctgtctgctgttggctttgtccgtctgcagcgccgcccctcggctccccgccaccggctcggctcggcccggagccccttccgctcgccggggcccagtcccggagcgccccggcccggctggcttgggctgcggtcccgggtccattgtccggcggtccgtctgtccggaggcggggcccagggacccagagcgcagcgcagcgccgaggcgccggatacagatcacttggattcagtcgagtttgctttgctccgtgggaactgcaccagaactggaggttagcatcttgcaaggaggtagtaacatatccagtcgtgaaactgggaaagaccaaagctcttgcatcanggaaacatgtcccgtcggaaacanacaaatccaaataaagttcactggnatcaantatttgctgggctanaagancaagcccgccaggcgatgatgaaaactgattttcctggagaccttggcaagtcancgacnagctatccaacaactaagagatcaggactccagtagcagtgagttctgnaccttctggtgacagtgagggtgatgaanagnaaactacacaagangaagtctcttcccacanatcanaanaanatggangggtgntcaaagtggagaaagaattanaaaaatanagaacactctgnttggttggggaacnaagtganaaancacnaaggttnacagggaaatttgaaatttctgaaccccttnncttgnaaatctnccaatngtncncntntgncnanttaaaantgcgagnaaccnnnggaaaaagtttnatttgntncaaatgntaacnagncaaanttggantcanttggttgaacanagccaaaaancntaaatgttntnctggnntannangaccggnnccaattaannatcccacngngatncattttgatccttnaancctcataaaacnaanttncannagaactanaaaaactaananntgganntnangttgttnaaaaaccnnggnntnaanaaanncatgtnnctaaatttttaaaaaaatntagaaaanaatnncnngaaaatcacatananataggaaacttncccnccnncnaannanantaannaaaaaagnnnntncnaatgntttaannagaaagaanaaatnanncntaaatcacntcnatagnataacncanctnaanaaaatatntcntaatantagngnaaaaan

SEQ ID NO: 870 - DNA, 1497 bp, Homo Sapiens
  misc_feature (263)..(263): n is a, c, g, or t
  misc_feature (272)..(272): n is a, c, g, or t
  misc_feature (275)..(275): n is a, c, g, or t
  misc_feature (297)..(297): n is a, c, g, or t
  misc_feature (303)..(303): n is a, c, g, or t
  misc_feature (311)..(311): n is a, c, g, or t
  misc_feature (318)..(318): n is a, c, g, or t
  misc_feature (323)..(323): n is a, c, g, or t
  misc_feature (334)..(334): n is a, c, g, or t
  misc_feature (338)..(338): n is a, c, g, or t
  misc_feature (341)..(341): n is a, c, g, or t
  misc_feature (375)..(376): n is a, c, g, or t
  misc_feature (382)..(382): n is a, c, g, or t
  misc_feature (384)..(384): n is a, c, g, or t
  misc_feature (407)..(407): n is a, c, g, or t
  misc_feature (409)..(409): n is a, c, g, or t
  misc_feature (416)..(416): n is a, c, g, or t
  misc_feature (419)..(419): n is a, c, g, or t
  misc_feature (470)..(470): n is a, c, g, or t
  misc_feature (474)..(474): n is a, c, g, or t
  misc_feature (487)..(488): n is a, c, g, or t
  misc_feature (491)..(491): n is a, c, g, or t
  misc_feature (520)..(520): n is a, c, g, or t
  misc_feature (531)..(531): n is a, c, g, or t
  misc_feature (541)..(541): n is a, c, g, or t
  misc_feature (547)..(547): n is a, c, g, or t
  misc_feature (555)..(555): n is a, c, g, or t
  misc_feature (583)..(583): n is a, c, g, or t
  misc_feature (614)..(614): n is a, c, g, or t
  misc_feature (639)..(639): n is a, c, g, or t
  misc_feature (644)..(644): n is a, c, g, or t
  misc_feature (648)..(648): n is a, c, g, or t
  misc_feature (660)..(660): n is a, c, g, or t
  misc_feature (669)..(669): n is a, c, g, or t
  misc_feature (680)..(680): n is a, c, g, or t
  misc_feature (684)..(684): n is a, c, g, or t
  misc_feature (689)..(689): n is a, c, g, or t
  misc_feature (693)..(693): n is a, c, g, or t
  misc_feature (696)..(696): n is a, c, g, or t
  misc_feature (698)..(698): n is a, c, g, or t
  misc_feature (706)..(706): n is a, c, g, or t
  misc_feature (724)..(724): n is a, c, g, or t
  misc_feature (729)..(729): n is a, c, g, or t
  misc_feature (731)..(731): n is a, c, g, or t
  misc_feature (742)..(742): n is a, c, g, or t
  misc_feature (745)..(745): n is a, c, g, or t
  misc_feature (753)..(754): n is a, c, g, or t
  misc_feature (761)..(761): n is a, c, g, or t
  misc_feature (768)..(768): n is a, c, g, or t
  misc_feature (780)..(780): n is a, c, g, or t
  misc_feature (784)..(784): n is a, c, g, or t
  misc_feature (800)..(800): n is a, c, g, or t
  misc_feature (802)..(802): n is a, c, g, or t
  misc_feature (804)..(804): n is a, c, g, or t
  misc_feature (809)..(809): n is a, c, g, or t
  misc_feature (820)..(821): n is a, c, g, or t
  misc_feature (824)..(824): n is a, c, g, or t
  misc_feature (829)..(829): n is a, c, g, or t
  misc_feature (835)..(835): n is a, c, g, or t
  misc_feature (843)..(844): n is a, c, g, or t
  misc_feature (850)..(850): n is a, c, g, or t
  misc_feature (852)..(852): n is a, c, g, or t
  misc_feature (860)..(860): n is a, c, g, or t
  misc_feature (876)..(876): n is a, c, g, or t
  misc_feature (878)..(878): n is a, c, g, or t
  misc_feature (883)..(884): n is a, c, g, or t
  misc_feature (886)..(886): n is a, c, g, or t
  misc_feature (888)..(888): n is a, c, g, or t
  misc_feature (892)..(892): n is a, c, g, or t
  misc_feature (895)..(895): n is a, c, g, or t
  misc_feature (897)..(897): n is a, c, g, or t
  misc_feature (908)..(908): n is a, c, g, or t
  misc_feature (910)..(911): n is a, c, g, or t
  misc_feature (919)..(919): n is a, c, g, or t
  misc_feature (924)..(924): n is a, c, g, or t
  misc_feature (926)..(926): n is a, c, g, or t
  misc_feature (931)..(932): n is a, c, g, or t
  misc_feature (940)..(940): n is a, c, g, or t
  misc_feature (950)..(950): n is a, c, g, or t
  misc_feature (956)..(956): n is a, c, g, or t
  misc_feature (958)..(958): n is a, c, g, or t
  misc_feature (967)..(967): n is a, c, g, or t
  misc_feature (969)..(970): n is a, c, g, or t
  misc_feature (985)..(985): n is a, c, g, or t
  misc_feature (988)..(988): n is a, c, g, or t
  misc_feature (991)..(992): n is a, c, g, or t
  misc_feature (994)..(994): n is a, c, g, or t
  misc_feature (1004)..(1005): n is a, c, g, or t
  misc_feature (1009)..(1011): n is a, c, g, or t
  misc_feature (1015)..(1016): n is a, c, g, or t
  misc_feature (1018)..(1018): n is a, c, g, or t
  misc_feature (1021)..(1022): n is a, c, g, or t
  misc_feature (1033)..(1034): n is a, c, g, or t
  misc_feature (1042)..(1042): n is a, c, g, or t
  misc_feature (1047)..(1047): n is a, c, g, or t
  misc_feature (1050)..(1050): n is a, c, g, or t
  misc_feature (1055)..(1056): n is a, c, g, or t
  misc_feature (1065)..(1065): n is a, c, g, or t
  misc_feature (1070)..(1070): n is a, c, g, or t
  misc_feature (1079)..(1079): n is a, c, g, or t
  misc_feature (1081)..(1081): n is a, c, g, or t
  misc_feature (1083)..(1083): n is a, c, g, or t
  misc_feature (1093)..(1094): n is a, c, g, or t
  misc_feature (1098)..(1100): n is a, c, g, or t
  misc_feature (1102)..(1103): n is a, c, g, or t
  misc_feature (1105)..(1105): n is a, c, g, or t
  misc_feature (1110)..(1110): n is a, c, g, or t
  misc_feature (1113)..(1113): n is a, c, g, or t
  misc_feature (1120)..(1121): n is a, c, g, or t
  misc_feature (1127)..(1127): n is a, c, g, or t
  misc_feature (1135)..(1135): n is a, c, g, or t
  misc_feature (1137)..(1137): n is a, c, g, or t
  misc_feature (1140)..(1140): n is a, c, g, or t
  misc_feature (1145)..(1146): n is a, c, g, or t
  misc_feature (1151)..(1151): n is a, c, g, or t
  misc_feature (1153)..(1153): n is a, c, g, or t
  misc_feature (1163)..(1163): n is a, c, g, or t
  misc_feature (1169)..(1170): n is a, c, g, or t
  misc_feature (1173)..(1175): n is a, c, g, or t
  misc_feature (1177)..(1179): n is a, c, g, or t
  misc_feature (1185)..(1185): n is a, c, g, or t
  misc_feature (1189)..(1189): n is a, c, g, or t
  misc_feature (1192)..(1193): n is a, c, g, or t
  misc_feature (1199)..(1199): n is a, c, g, or t
  misc_feature (1202)..(1202): n is a, c, g, or t
  misc_feature (1205)..(1205): n is a, c, g, or t
  misc_feature (1207)..(1207): n is a, c, g, or t
  misc_feature (1210)..(1211): n is a, c, g, or t
  misc_feature (1225)..(1226): n is a, c, g, or t
  misc_feature (1233)..(1234): n is a, c, g, or t
  misc_feature (1236)..(1236): n is a, c, g, or t
  misc_feature (1239)..(1239): n is a, c, g, or t
  misc_feature (1247)..(1248): n is a, c, g, or t
  misc_feature (1252)..(1252): n is a, c, g, or t
  misc_feature (1258)..(1258): n is a, c, g, or t
  misc_feature (1263)..(1264): n is a, c, g, or t
  misc_feature (1266)..(1266): n is a, c, g, or t
  misc_feature (1270)..(1270): n is a, c, g, or t
  misc_feature (1281)..(1281): n is a, c, g, or t
  misc_feature (1285)..(1285): n is a, c, g, or t
  misc_feature (1291)..(1292): n is a, c, g, or t
  misc_feature (1296)..(1296): n is a, c, g, or t
  misc_feature (1299)..(1299): n is a, c, g, or t
  misc_feature (1303)..(1303): n is a, c, g, or t
  misc_feature (1311)..(1312): n is a, c, g, or t
  misc_feature (1314)..(1314): n is a, c, g, or t
  misc_feature (1318)..(1318): n is a, c, g, or t
  misc_feature (1320)..(1320): n is a, c, g, or t
  misc_feature (1327)..(1327): n is a, c, g, or t
  misc_feature (1333)..(1333): n is a, c, g, or t
  misc_feature (1338)..(1338): n is a, c, g, or t
  misc_feature (1344)..(1344): n is a, c, g, or t
  misc_feature (1346)..(1346): n is a, c, g, or t
  misc_feature (1348)..(1348): n is a, c, g, or t
  misc_feature (1350)..(1350): n is a, c, g, or t
  misc_feature (1353)..(1353): n is a, c, g, or t
  misc_feature (1355)..(1355): n is a, c, g, or t
  misc_feature (1361)..(1361): n is a, c, g, or t
  misc_feature (1366)..(1366): n is a, c, g, or t
  misc_feature (1369)..(1369): n is a, c, g, or t
  misc_feature (1372)..(1372): n is a, c, g, or t
  misc_feature (1376)..(1376): n is a, c, g, or t
  misc_feature (1379)..(1380): n is a, c, g, or t
  misc_feature (1384)..(1384): n is a, c, g, or t
  misc_feature (1395)..(1395): n is a, c, g, or t
  misc_feature (1399)..(1399): n is a, c, g, or t
  misc_feature (1403)..(1403): n is a, c, g, or t
  misc_feature (1421)..(1421): n is a, c, g, or t
  misc_feature (1425)..(1426): n is a, c, g, or t
  misc_feature (1434)..(1436): n is a, c, g, or t
  misc_feature (1441)..(1441): n is a, c, g, or t
  misc_feature (1443)..(1443): n is a, c, g, or t
  misc_feature (1451)..(1451): n is a, c, g, or t
  misc_feature (1453)..(1455): n is a, c, g, or t
  misc_feature (1460)..(1460): n is a, c, g, or t
  misc_feature (1464)..(1464): n is a, c, g, or t
  misc_feature (1478)..(1478): n is a, c, g, or t
  misc_feature (1484)..(1484): n is a, c, g, or t
agagagattaactatgagaggatcgcatcaccatcaccatcacggatcctatttaggtgacactatagaatcgtcgacccacgcgtccgccggcgtcgtgggggcccgtccgcgagcttcgccaccgcctcaaggcccgctaccaggaccgccgggcgctcttcatcgctgggcgctggccgtgccgcctggtgcaatggcgggtccccggccacaacaggcttctccacctccttgcgggggcccaggtggtcccggcggcngtcccggcnacncgctggatgcagcggcggcggntgtggntgccgcgnacgtggnggtgngtgtgggtggngccntangcgtgggcggctgctgctccgggtctgggaacannaagcgncnacgtcaagctcccggggttggcncngttggcnagnggcagtcccgagcgtgaggaggtcggcacaagctacaacagtgaggacaantatnaggcggctgcaannacncatcgaggctatggaccctgccactgtcnagcaacaagancattggtttnaaaagnccctacgnaaacaagaagggcttcatcatcaaacanatgaatgaggatggcgcctgtctcttccggnctgtagctgaccaggatgtatgganaccanaaantgcatgaggttntgcgaaaanattgcatgaantatntgatnaaanaangncagactantttctccaactatgtcanaaaanantttaccacctnatntttaacanngaaccgnaaaaacnaattgcccatgncaanccacattttgaaatanangnccatntcaaaatattnnacnaaccnttcctngtggaagnntgtacnantaatgccnccagaaaccatcaacncntttcnnangngganacntnaaaaacgaagnannaaaccccntttcnanttaanntaacaaancgaaaaaaancacatnanaaattcatngnnggaaatcctaacaanggncannanttaggaaagnngatnnncctnncnatnnttcaaaaaagnnatttgtcnaaaanttnttctnntaaaaattnccaanaaaaaatcncncngattccttgnnttcnnncnntnaaagnacnaaaaaannaaaaangttccaananttngtaanncctanantagatccctncagaannagnnncnnngaaaanccanccnntatatnttncgnancannaaaaaaaattacannactcaanncntancatactcnnaaancaaacncaaannanattntacaaaataanctcncattgnnacgnaanaaanactctctnntngccnanaataacnctcttntcaanaacttnantntntantnagagantaacnccnttnctcnaanntttntattttaatanttcnctcntacaaaaaacaaattttngagnnaaaagaannntcctntncatctcantnnngaggncttntcaataccctcacntgttanatagaaataacta

SEQ ID NO: 871 - DNA, 1423 bp, Homo Sapiens
  misc_feature (739)..(739): n is a, c, g, or t
  misc_feature (743)..(743): n is a, c, g, or t
  misc_feature (745)..(745): n is a, c, g, or t
  misc_feature (752)..(754): n is a, c, g, or t
  misc_feature (756)..(757): n is a, c, g, or t
  misc_feature (759)..(760): n is a, c, g, or t
  misc_feature (777)..(777): n is a, c, g, or t
  misc_feature (827)..(827): n is a, c, g, or t
  misc_feature (833)..(833): n is a, c, g, or t
  misc_feature (871)..(872): n is a, c, g, or t
  misc_feature (897)..(897): n is a, c, g, or t
  misc_feature (914)..(914): n is a, c, g, or t
  misc_feature (917)..(917): n is a, c, g, or t
  misc_feature (922)..(922): n is a, c, g, or t
  misc_feature (924)..(924): n is a, c, g, or t
  misc_feature (928)..(928): n is a, c, g, or t
  misc_feature (932)..(932): n is a, c, g, or t
  misc_feature (938)..(938): n is a, c, g, or t
  misc_feature (971)..(972): n is a, c, g, or t
  misc_feature (974)..(974): n is a, c, g, or t
  misc_feature (984)..(984): n is a, c, g, or t
  misc_feature (986)..(986): n is a, c, g, or t
  misc_feature (989)..(990): n is a, c, g, or t
  misc_feature (992)..(992): n is a, c, g, or t
  misc_feature (995)..(995): n is a, c, g, or t
  misc_feature (1002)..(1004): n is a, c, g, or t
  misc_feature (1006)..(1006): n is a, c, g, or t
  misc_feature (1022)..(1022): n is a, c, g, or t
  misc_feature (1030)..(1030): n is a, c, g, or t
  misc_feature (1040)..(1040): n is a, c, g, or t
  misc_feature (1051)..(1051): n is a, c, g, or t
  misc_feature (1054)..(1054): n is a, c, g, or t
  misc_feature (1063)..(1063): n is a, c, g, or t
  misc_feature (1066)..(1066): n is a, c, g, or t
  misc_feature (1070)..(1070): n is a, c, g, or t
  misc_feature (1078)..(1078): n is a, c, g, or t
  misc_feature (1081)..(1081): n is a, c, g, or t
  misc_feature (1101)..(1101): n is a, c, g, or t
  misc_feature (1117)..(1117): n is a, c, g, or t
  misc_feature (1119)..(1119): n is a, c, g, or t
  misc_feature (1124)..(1124): n is a, c, g, or t
  misc_feature (1135)..(1135): n is a, c, g, or t
  misc_feature (1140)..(1140): n is a, c, g, or t
  misc_feature (1146)..(1146): n is a, c, g, or t
  misc_feature (1152)..(1153): n is a, c, g, or t
  misc_feature (1159)..(1160): n is a, c, g, or t
  misc_feature (1162)..(1164): n is a, c, g, or t
  misc_feature (1166)..(1167): n is a, c, g, or t
  misc_feature (1173)..(1173): n is a, c, g, or t
  misc_feature (1178)..(1178): n is a, c, g, or t
  misc_feature (1181)..(1181): n is a, c, g, or t
  misc_feature (1192)..(1192): n is a, c, g, or t
  misc_feature (1216)..(1216): n is a, c, g, or t
  misc_feature (1218)..(1218): n is a, c, g, or t
  misc_feature (1220)..(1220): n is a, c, g, or t
  misc_feature (1228)..(1228): n is a, c, g, or t
  misc_feature (1237)..(1238): n is a, c, g, or t
  misc_feature (1245)..(1245): n is a, c, g, or t
  misc_feature (1250)..(1250): n is a, c, g, or t
  misc_feature (1253)..(1253): n is a, c, g, or t
  misc_feature (1257)..(1259): n is a, c, g, or t
  misc_feature (1263)..(1263): n is a, c, g, or t
  misc_feature (1268)..(1268): n is a, c, g, or t
  misc_feature (1270)..(1270): n is a, c, g, or t
  misc_feature (1274)..(1274): n is a, c, g, or t
  misc_feature (1277)..(1279): n is a, c, g, or t
  misc_feature (1281)..(1281): n is a, c, g, or t
  misc_feature (1286)..(1286): n is a, c, g, or t
  misc_feature (1294)..(1294): n is a, c, g, or t
  misc_feature (1297)..(1297): n is a, c, g, or t
  misc_feature (1301)..(1301): n is a, c, g, or t
  misc_feature (1303)..(1303): n is a, c, g, or t
  misc_feature (1308)..(1308): n is a, c, g, or t
  misc_feature (1317)..(1318): n is a, c, g, or t
  misc_feature (1331)..(1331): n is a, c, g, or t
  misc_feature (1334)..(1334): n is a, c, g, or t
  misc_feature (1339)..(1339): n is a, c, g, or t
  misc_feature (1342)..(1342): n is a, c, g, or t
  misc_feature (1344)..(1344): n is a, c, g, or t
  misc_feature (1349)..(1349): n is a, c, g, or t
  misc_feature (1352)..(1352): n is a, c, g, or t
  misc_feature (1354)..(1354): n is a, c, g, or t
  misc_feature (1361)..(1361): n is a, c, g, or t
  misc_feature (1363)..(1363): n is a, c, g, or t
  misc_feature (1369)..(1369): n is a, c, g, or t
  misc_feature (1376)..(1376): n is a, c, g, or t
  misc_feature (1378)..(1378): n is a, c, g, or t
  misc_feature (1382)..(1382): n is a, c, g, or t
  misc_feature (1387)..(1387): n is a, c, g, or t
  misc_feature (1389)..(1389): n is a, c, g, or t
  misc_feature (1391)..(1391): n is a, c, g, or t
  misc_feature (1394)..(1396): n is a, c, g, or t
  misc_feature (1399)..(1399): n is a, c, g, or t
  misc_feature (1408)..(1408): n is a, c, g, or t
  misc_feature (1411)..(1411): n is a, c, g, or t
  misc_feature (1413)..(1414): n is a, c, g, or t
  misc_feature (1418)..(1418): n is a, c, g, or t
tagagaaattactatgagaggatcgcatcaccatcaccatcacggatcctatttaggtgacactatagaatcgtcgacccacgcgtccggcgagccctgtgccacgcgctcactttcccttccctgcagcggctcgtctactccatgtgctccctctgccaggaggagaatgaagacatggtacaagatgcgctgcagcagaacccgggcgccttcaggctagctcccgccctgcctgcccggccccaccgaggcctgagcacgttcccgggtgccgagcactgcctccgggcttcccccaagaccacgcttagcggtggcttcttcgttgctgtaattgaacgggtcgagatgccgacgtgagtgagtgggggcatgcttgggaggcgcaggatggtactggcacatctaacatctacatttctctagctcagcctcacaggccaaagcatcagcaccagaacgcacacccagcccagccccaaagagaaagaagagagcaaaaagctgcagccggtgcttgcacaccgccttgcacatagcagaggctccgggctcactccttcctggtggaaaaggaagatgcctgtcctctccgtggaagaccctgggccctcaccgcaggcagcagtttgcgttttgaaaggttattgggtcccttcctcgggctgtgttcttgctggtgagcaaaagtgttgcctgcagaaataaaatgcagaacgtactctaaaaaaaaaanaaananaaaaatnnntnntnngggcggccgctccctanagtgagtcgtattaagctttaattagctgagcttggactcctgttgatanatccantaatgacctcaagaactccatctggatttgttcaaaannctcggttgccgccgggcgttttttnttgttgaaaatccaaantancttgncnagantttnaggaantaaggaaaccttaaatggaaaaaaaaaatcctnnanaaacccccgntnaanntnccnaatggcnnncntaaaaaaaatttttgnggcatttnaatccttttnctccatgaacnctnaaaacaaancgnttcnacttgaantancggcctttttaaaaaaccgnaaaaaaaaaaaaaccnanttttnaccggcctttnttcantttttncccccnnaaaaanncnnncnnaatttnatggnaanaaaaagggaantgggaaaggaaaaagttccccttnananttttcagnaaaaaaaanntttttcncttgnaanaaannnaaanttcgngntttnaannntncaaangggggttnagnaaangnctttnccagggttnnaaaatttttcccnccnctggnatncntttanaangnaaaaaantncccttntagaaananaaanggtancngnttnnnctntttatttcnaanannaatngatgg

SEQ ID NO: 872 - DNA, 1200 bp, Homo Sapiens
  misc_feature (2)..(2): n is a, c, g, or t
  misc_feature (467)..(467): n is a, c, g, or t
  misc_feature (474)..(474): n is a, c, g, or t
  misc_feature (482)..(482): n is a, c, g, or t
  misc_feature (486)..(486): n is a, c, g, or t
  misc_feature (488)..(488): n is a, c, g, or t
  misc_feature (491)..(491): n is a, c, g, or t
  misc_feature (501)..(501): n is a, c, g, or t
  misc_feature (507)..(507): n is a, c, g, or t
  misc_feature (510)..(510): n is a, c, g, or t
  misc_feature (512)..(512): n is a, c, g, or t
  misc_feature (515)..(515): n is a, c, g, or t
  misc_feature (519)..(519): n is a, c, g, or t
  misc_feature (524)..(524): n is a, c, g, or t
  misc_feature (529)..(529): n is a, c, g, or t
  misc_feature (531)..(531): n is a, c, g, or t
  misc_feature (533)..(533): n is a, c, g, or t
  misc_feature (536)..(536): n is a, c, g, or t
  misc_feature (542)..(542): n is a, c, g, or t
  misc_feature (545)..(545): n is a, c, g, or t
  misc_feature (547)..(547): n is a, c, g, or t
  misc_feature (550)..(550): n is a, c, g, or t
  misc_feature (563)..(563): n is a, c, g, or t
  misc_feature (566)..(567): n is a, c, g, or t
  misc_feature (569)..(569): n is a, c, g, or t
  misc_feature (574)..(574): n is a, c, g, or t
  misc_feature (576)..(576): n is a, c, g, or t
  misc_feature (578)..(578): n is a, c, g, or t
  misc_feature (590)..(590): n is a, c, g, or t
  misc_feature (597)..(597): n is a, c, g, or t
  misc_feature (600)..(600): n is a, c, g, or t
  misc_feature (606)..(606): n is a, c, g, or t
  misc_feature (629)..(629): n is a, c, g, or t
  misc_feature (632)..(632): n is a, c, g, or t
  misc_feature (638)..(639): n is a, c, g, or t
  misc_feature (644)..(644): n is a, c, g, or t
  misc_feature (647)..(647): n is a, c, g, or t
  misc_feature (650)..(650): n is a, c, g, or t
  misc_feature (652)..(653): n is a, c, g, or t
  misc_feature (667)..(667): n is a, c, g, or t
  misc_feature (670)..(670): n is a, c, g, or t
  misc_feature (673)..(674): n is a, c, g, or t
  misc_feature (679)..(679): n is a, c, g, or t
  misc_feature (687)..(688): n is a, c, g, or t
  misc_feature (692)..(692): n is a, c, g, or t
  misc_feature (707)..(707): n is a, c, g, or t
  misc_feature (714)..(714): n is a, c, g, or t
  misc_feature (731)..(732): n is a, c, g, or t
  misc_feature (741)..(741): n is a, c, g, or t
  misc_feature (745)..(745): n is a, c, g, or t
  misc_feature (760)..(760): n is a, c, g, or t
  misc_feature (769)..(770): n is a, c, g, or t
  misc_feature (779)..(779): n is a, c, g, or t
  misc_feature (782)..(782): n is a, c, g, or t
  misc_feature (791)..(791): n is a, c, g, or t
  misc_feature (798)..(798): n is a, c, g, or t
  misc_feature (801)..(801): n is a, c, g, or t
  misc_feature (806)..(806): n is a, c, g, or t
  misc_feature (817)..(817): n is a, c, g, or t
  misc_feature (820)..(820): n is a, c, g, or t
  misc_feature (827)..(827): n is a, c, g, or t
  misc_feature (829)..(829): n is a, c, g, or t
  misc_feature (831)..(831): n is a, c, g, or t
  misc_feature (833)..(833): n is a, c, g, or t
  misc_feature (837)..(837): n is a, c, g, or t
  misc_feature (839)..(840): n is a, c, g, or t
  misc_feature (842)..(842): n is a, c, g, or t
  misc_feature (846)..(846): n is a, c, g, or t
  misc_feature (850)..(850): n is a, c, g, or t
  misc_feature (854)..(854): n is a, c, g, or t
  misc_feature (858)..(858): n is a, c, g, or t
  misc_feature (861)..(861): n is a, c, g, or t
  misc_feature (870)..(871): n is a, c, g, or t
  misc_feature (885)..(885): n is a, c, g, or t
  misc_feature (888)..(888): n is a, c, g, or t
  misc_feature (896)..(896): n is a, c, g, or t
  misc_feature (898)..(898): n is a, c, g, or t
  misc_feature (913)..(913): n is a, c, g, or t
  misc_feature (919)..(919): n is a, c, g, or t
  misc_feature (928)..(928): n is a, c, g, or t
  misc_feature (931)..(931): n is a, c, g, or t
  misc_feature (935)..(935): n is a, c, g, or t
  misc_feature (938)..(938): n is a, c, g, or t
  misc_feature (944)..(944): n is a, c, g, or t
  misc_feature (949)..(949): n is a, c, g, or t
  misc_feature (954)..(954): n is a, c, g, or t
  misc_feature (975)..(975): n is a, c, g, or t
  misc_feature (979)..(979): n is a, c, g, or t
  misc_feature (982)..(983): n is a, c, g, or t
  misc_feature (988)..(988): n is a, c, g, or t
  misc_feature (994)..(994): n is a, c, g, or t
  misc_feature (998)..(998): n is a, c, g, or t
  misc_feature (1002)..(1002): n is a, c, g, or t
  misc_feature (1038)..(1038): n is a, c, g, or t
  misc_feature (1042)..(1042): n is a, c, g, or t
  misc_feature (1061)..(1061): n is a, c, g, or t
  misc_feature (1082)..(1082): n is a, c, g, or t
  misc_feature (1101)..(1101): n is a, c, g, or t
  misc_feature (1108)..(1108): n is a, c, g, or t
  misc_feature (1115)..(1115): n is a, c, g, or t
  misc_feature (1127)..(1127): n is a, c, g, or t
  misc_feature (1131)..(1131): n is a, c, g, or t
  misc_feature (1135)..(1135): n is a, c, g, or t
  misc_feature (1138)..(1138): n is a, c, g, or t
  misc_feature (1141)..(1141): n is a, c, g, or t
  misc_feature (1145)..(1145): n is a, c, g, or t
  misc_feature (1147)..(1147): n is a, c, g, or t
  misc_feature (1161)..(1161): n is a, c, g, or t
  misc_feature (1163)..(1163): n is a, c, g, or t
  misc_feature (1171)..(1171): n is a, c, g, or t
  misc_feature (1177)..(1177): n is a, c, g, or t
  misc_feature (1180)..(1182): n is a, c, g, or t
  misc_feature (1186)..(1186): n is a, c, g, or t
  misc_feature (1190)..(1190): n is a, c, g, or t
  misc_feature (1193)..(1195): n is a, c, g, or t
  misc_feature (1200)..(1200): n is a, c, g, or t
antagagaaattactatgagaggatcgcatcaccatcaccatcacggatcctatttaggtgacactatagaatcgtcgacccacgcgtccgaaaaaagagaacgagaaagacaagaactgagaattttagtgggaacaaatttggtgcgcctcagtcagttggaaggtgtaaatgtggaacgttacaaacagattgttttgactggcatattggagcaagttgtaaactgtagggatgctttggctcaagaatatctcatggagtgtattattcaggttttccctgatgaatttcacctccagactttgaatccttttcttcgggcctgtgctgagttacaccagaatgtaaatgtgaagaacataatcattgctttaattgatagattagctttatttgctcaccgtgaagatggacctggaatcccagcggatattaaactttttgatatattttcacagcaggnggctacngtgatacngtcnanacnagacatgccntccgangangntgnatcnttacnagtcncncngantaatcntgncntgnaatggtaccctgntcnngnggacnangntgataaagttcnagaaacnacngtgganatattccataagctccaccttgnacntattgnnaccantantgnannttccaaggaactcnccnganntttgnaaataccnnttgncccctaccacaatantttaacngtcctggaattaaaacnntttcccccnctcnttgaataccttgacnaccaatccnnaaagaacanganttggtatgngcctaanaanggtcnggaataaaacncanaaattgncncncnagancnngnggantccntaangganttnggaaccccnnttgatccaaatccnccnaatcaccngnaaaaaaccctgatcnaaaaantttgctgangancaanccntggggncgctncatcntctgctggcctctgaggaccngacnacnntactngatttngacncgcncgaaacatttgagctggggaatcagcggatccctcncctnccccttggattgcactacnctggctttcaataaaaaatcnaagggagaaatggaaaaangccaaanttttttncccccaatcagntttnaaanaanggnaatncntaaatttttcggananccgggganggtttnaannnaaanccanatnnnccccn

SEQ ID NO: 873 - DNA, 1408 bp, Homo Sapiens
  misc_feature (870)..(870): n is a, c, g, or t
  misc_feature (897)..(897): n is a, c, g, or t
  misc_feature (946)..(946): n is a, c, g, or t
  misc_feature (960)..(960): n is a, c, g, or t
  misc_feature (971)..(971): n is a, c, g, or t
  misc_feature (980)..(980): n is a, c, g, or t
  misc_feature (988)..(988): n is a, c, g, or t
  misc_feature (1006)..(1006): n is a, c, g, or t
  misc_feature (1020)..(1020): n is a, c, g, or t
  misc_feature (1025)..(1025): n is a, c, g, or t
  misc_feature (1062)..(1062): n is a, c, g, or t
  misc_feature (1073)..(1073): n is a, c, g, or t
  misc_feature (1084)..(1084): n is a, c, g, or t
  misc_feature (1089)..(1089): n is a, c, g, or t
  misc_feature (1095)..(1095): n is a, c, g, or t
  misc_feature (1098)..(1098): n is a, c, g, or t
  misc_feature (1110)..(1110): n is a, c, g, or t
  misc_feature (1123)..(1126): n is a, c, g, or t
  misc_feature (1128)..(1135): n is a, c, g, or t
  misc_feature (1137)..(1148): n is a, c, g, or t
  misc_feature (1150)..(1151): n is a, c, g, or t
  misc_feature (1159)..(1159): n is a, c, g, or t
  misc_feature (1163)..(1163): n is a, c, g, or t
  misc_feature (1166)..(1167): n is a, c, g, or t
  misc_feature (1177)..(1177): n is a, c, g, or t
  misc_feature (1183)..(1183): n is a, c, g, or t
  misc_feature (1186)..(1186): n is a, c, g, or t
  misc_feature (1190)..(1190): n is a, c, g, or t
  misc_feature (1192)..(1192): n is a, c, g, or t
  misc_feature (1208)..(1208): n is a, c, g, or t
  misc_feature (1210)..(1211): n is a, c, g, or t
  misc_feature (1221)..(1221): n is a, c, g, or t
  misc_feature (1225)..(1225): n is a, c, g, or t
  misc_feature (1228)..(1228): n is a, c, g, or t
  misc_feature (1233)..(1233): n is a, c, g, or t
  misc_feature (1236)..(1237): n is a, c, g, or t
  misc_feature (1255)..(1255): n is a, c, g, or t
  misc_feature (1279)..(1279): n is a, c, g, or t
  misc_feature (1288)..(1288): n is a, c, g, or t
  misc_feature (1302)..(1302): n is a, c, g, or t
  misc_feature (1305)..(1306): n is a, c, g, or t
  misc_feature (1308)..(1308): n is a, c, g, or t
  misc_feature (1310)..(1311): n is a, c, g, or t
  misc_feature (1314)..(1314): n is a, c, g, or t
  misc_feature (1316)..(1317): n is a, c, g, or t
  misc_feature (1327)..(1327): n is a, c, g, or t
  misc_feature (1333)..(1333): n is a, c, g, or t
  misc_feature (1337)..(1337): n is a, c, g, or t
  misc_feature (1347)..(1347): n is a, c, g, or t
  misc_feature (1351)..(1351): n is a, c, g, or t
  misc_feature (1363)..(1364): n is a, c, g, or t
  misc_feature (1369)..(1370): n is a, c, g, or t
  misc_feature (1372)..(1372): n is a, c, g, or t
  misc_feature (1374)..(1375): n is a, c, g, or t
  misc_feature (1377)..(1378): n is a, c, g, or t
  misc_feature (1380)..(1380): n is a, c, g, or t
  misc_feature (1384)..(1384): n is a, c, g, or t
  misc_feature (1386)..(1387): n is a, c, g, or t
  misc_feature (1389)..(1389): n is a, c, g, or t
  misc_feature (1397)..(1397): n is a, c, g, or t
  misc_feature (1400)..(1400): n is a, c, g, or t
tagagaaattactatgagaggatcgcatcaccatcaccatcacggatcctatttaggtgacactatagaatcgtcgacccacgcgtccgcccacgcgtccggtcagggcgcacaaaccccaggagagaaggcggaagcagcagcgactctaaaggcagccccaggctggctaaagcggttcctggtatggaaacctaggcccgcgagtgcccgggcccagcccggcctagttcaggaagcagctcagccccagggcagcacatcagagacaccatggaacacagccattcctctgccgtcgtgctgggaccagtctttcctgaccaatatcaccttcttgaaggttcttctctggttggtcctgctgggactgtttgtggaactggaatttggcctggcatattttgtcctgtccttgttctattggatgtacgtcgggacacgaggccctgaagagaagaaagagggagagaagagcgcctactctgtgttcaatccaggctgtgaagccatccagggcaccctgactgcagagcagttggagcgcgagttacagttgagacccctggcagggagataggacccagctgtgctgtcatgcagctaacctctgatgtggtcttcctcaccattggctatggatttgatttcaggtgtataggactaagggcagcttgcgggttagctctgtgactgcatagtttttctaccttctttccctgatcttttgctgccatttgatctttgatagttttggtgaaactctctaaaatacattcactgtgggtccgacgcaatttataaaaattatgtactcaagaagggagacctgtttgtttcatttctcatctgtttgggagatgagtttanagcactagaaaggcactggggaaaatnctcagcttaaaacatccagcagtttgaagtatgattaggtacatcaggnctgcattgtcaagnttctctttaantcttttaanatttatancaatttttttttttcccngaaaagtttaggtngcaantttggggttcctggttggtttttgttttgcttcccgnctttaaattcnttaattttcanccatnacgggnatngaaaaaaaaaantctttaaaccaannnnannnnnnnnannnnnnnnnnnnanngggggggncccnccnnaagggggccnaataanctnaatnanctgaactggaacccgntnnaaaaaccaanaganccncaaanccnntggattttttaaaacccnggtggcccgggggttttttttggnaaacccccntttggggaattttnggnnangnnctnannggaaaaaacngggatncccnttaatatccngggnccaaaaatttgnnttttnntntnngnnanaaananntngaaatatnttnaaaaaaaa

SEQ ID NO: 874 - DNA, 1406 bp, Homo Sapiens
  misc_feature (919)..(919): n is a, c, g, or t
  misc_feature (946)..(946): n is a, c, g, or t
  misc_feature (972)..(972): n is a, c, g, or t
  misc_feature (978)..(978): n is a, c, g, or t
  misc_feature (990)..(990): n is a, c, g, or t
  misc_feature (999)..(999): n is a, c, g, or t
  misc_feature (1019)..(1019): n is a, c, g, or t
  misc_feature (1025)..(1026): n is a, c, g, or t
  misc_feature (1038)..(1038): n is a, c, g, or t
  misc_feature (1045)..(1045): n is a, c, g, or t
  misc_feature (1054)..(1054): n is a, c, g, or t
  misc_feature (1061)..(1061): n is a, c, g, or t
  misc_feature (1065)..(1065): n is a, c, g, or t
  misc_feature (1076)..(1076): n is a, c, g, or t
  misc_feature (1083)..(1083): n is a, c, g, or t
  misc_feature (1093)..(1093): n is a, c, g, or t
  misc_feature (1095)..(1095): n is a, c, g, or t
  misc_feature (1103)..(1103): n is a, c, g, or t
  misc_feature (1108)..(1108): n is a, c, g, or t
  misc_feature (1112)..(1113): n is a, c, g, or t
  misc_feature (1123)..(1123): n is a, c, g, or t
  misc_feature (1125)..(1126): n is a, c, g, or t
  misc_feature (1129)..(1129): n is a, c, g, or t
  misc_feature (1134)..(1134): n is a, c, g, or t
  misc_feature (1139)..(1139): n is a, c, g, or t
  misc_feature (1142)..(1142): n is a, c, g, or t
  misc_feature (1158)..(1158): n is a, c, g, or t
  misc_feature (1161)..(1161): n is a, c, g, or t
  misc_feature (1172)..(1172): n is a, c, g, or t
  misc_feature (1190)..(1190): n is a, c, g, or t
  misc_feature (1195)..(1196): n is a, c, g, or t
  misc_feature (1209)..(1209): n is a, c, g, or t
  misc_feature (1218)..(1218): n is a, c, g, or t
  misc_feature (1223)..(1223): n is a, c, g, or t
  misc_feature (1225)..(1225): n is a, c, g, or t
  misc_feature (1228)..(1228): n is a, c, g, or t
  misc_feature (1236)..(1238): n is a, c, g, or t
  misc_feature (1242)..(1242): n is a, c, g, or t
  misc_feature (1247)..(1247): n is a, c, g, or t
  misc_feature (1256)..(1256): n is a, c, g, or t
  misc_feature (1260)..(1260): n is a, c, g, or t
  misc_feature (1270)..(1271): n is a, c, g, or t
  misc_feature (1282)..(1282): n is a, c, g, or t
  misc_feature (1293)..(1294): n is a, c, g, or t
  misc_feature (1297)..(1297): n is a, c, g, or t
  misc_feature (1300)..(1300): n is a, c, g, or t
  misc_feature (1309)..(1309): n is a, c, g, or t
  misc_feature (1313)..(1313): n is a, c, g, or t
  misc_feature (1317)..(1317): n is a, c, g, or t
  misc_feature (1321)..(1322): n is a, c, g, or t
  misc_feature (1327)..(1328): n is a, c, g, or t
  misc_feature (1333)..(1333): n is a, c, g, or t
  misc_feature (1336)..(1336): n is a, c, g, or t
  misc_feature (1342)..(1344): n is a, c, g, or t
  misc_feature (1351)..(1351): n is a, c, g, or t
  misc_feature (1360)..(1360): n is a, c, g, or t
  misc_feature (1362)..(1362): n is a, c, g, or t
  misc_feature (1364)..(1365): n is a, c, g, or t
  misc_feature (1368)..(1369): n is a, c, g, or t
  misc_feature (1375)..(1375): n is a, c, g, or t
  misc_feature (1381)..(1381): n is a, c, g, or t
  misc_feature (1399)..(1400): n is a, c, g, or t
  misc_feature (1403)..(1403): n is a, c, g, or t
  misc_feature (1405)..(1405): n is a, c, g, or t
tagagagattactatgagaggatcgcatcaccatcaccatcacggatcctatttaggtgacactatagaatcgtcgacccacgcgtccgcccacgcgtccgccgctcctcctcctggcaggccggccgcggagtcagctgacgccggcgctccagcctcgcctccccgcgccgcgctctgcgctccccgaaagtggctgcaagccggccgcccactgtcagggttggggggacagagaaagtgatgtgcgccttctaaagcctcgcccagcgccgccgaagcagcttcacctctccaactttctcccaccgactgcttgtcttgaccctgccctccaccctccccagagccacttcgggtgcgcgctcttgggtaaagggggggtcaccggctgtctgggatggcttccaattttaatgacatagtgaagcaagggtacgtgaggatccggagcagacgcctcgggatttatcagcgatgctggttagtattcaagaaagcttcaagcaaaggtccaaaaagactggagaaattttctgatgaacgtgctgcatatttcaggtgttatcataaggttacagaactcaataatgtgaagaacgtagctcgattgccaaaaagcaccaagaaacatgccatagggatttatttcaatgacgatacctccaagacttttgcttgcgaatcagatcttgaggctgatgagtggtgcaaagtactccagatggagtgtgtaggaacacggatcaatgacatcagccttggagagcctgacttactggccactggggttgagagagaacagagtgagagattcaatgtgtatttgatgccatctcctaacttaaatgtacatggcgaatgtgccttgcaaattacatatgagtatatctgtctttggggacgtccaaaatcccanagtcaaactcatctcttggccgctaancgccctggcggcggtatggacgtganactacntggttcactttnaagcaaggnagaatgtttaaaactggttnaagggnntgttattttttnaaacccnaaacggggnggccatntatnaaaaagtccanctttggntgctttggcnanaacccaanaacanaaanntttgttaaanannggnaaaantccantcntcaaaaaaaaataaanaangggccccctcnctaaaaaaatggggcccntgctnnaaagcctatgggnaaaattaangggananaanggggaaannntacnttggnaaattttcncccnttaaaatttnnaaaaaaatttncccaaattaanntanaangcaaatttnaaantttnaggnncccannccccnggncaaaannnggaaaanaaaaaaaanancnnaannggggtnaaaacnaaaatttttttttttttnnaanang

SEQ ID NO: 875 - DNA, 1200 bp, Homo Sapiens
  misc_feature (802)..(802): n is a, c, g, or t
  misc_feature (805)..(805): n is a, c, g, or t
  misc_feature (879)..(889): n is a, c, g, or t
  misc_feature (891)..(902): n is a, c, g, or t
  misc_feature (918)..(918): n is a, c, g, or t
  misc_feature (934)..(934): n is a, c, g, or t
  misc_feature (937)..(937): n is a, c, g, or t
  misc_feature (940)..(940): n is a, c, g, or t
  misc_feature (945)..(945): n is a, c, g, or t
  misc_feature (950)..(950): n is a, c, g, or t
  misc_feature (960)..(960): n is a, c, g, or t
  misc_feature (965)..(965): n is a, c, g, or t
  misc_feature (974)..(974): n is a, c, g, or t
  misc_feature (987)..(987): n is a, c, g, or t
  misc_feature (1005)..(1005): n is a, c, g, or t
  misc_feature (1014)..(1014): n is a, c, g, or t
  misc_feature (1021)..(1021): n is a, c, g, or t
  misc_feature (1025)..(1025): n is a, c, g, or t
  misc_feature (1040)..(1040): n is a, c, g, or t
  misc_feature (1057)..(1057): n is a, c, g, or t
  misc_feature (1061)..(1061): n is a, c, g, or t
  misc_feature (1068)..(1069): n is a, c, g, or t
  misc_feature (1077)..(1077): n is a, c, g, or t
  misc_feature (1081)..(1081): n is a, c, g, or t
  misc_feature (1086)..(1086): n is a, c, g, or t
  misc_feature (1091)..(1091): n is a, c, g, or t
  misc_feature (1117)..(1117): n is a, c, g, or t
  misc_feature (1119)..(1120): n is a, c, g, or t
  misc_feature (1127)..(1127): n is a, c, g, or t
  misc_feature (1134)..(1134): n is a, c, g, or t
  misc_feature (1140)..(1140): n is a, c, g, or t
  misc_feature (1145)..(1145): n is a, c, g, or t
  misc_feature (1149)..(1149): n is a, c, g, or t
  misc_feature (1151)..(1151): n is a, c, g, or t
  misc_feature (1159)..(1159): n is a, c, g, or t
  misc_feature (1163)..(1163): n is a, c, g, or t
  misc_feature (1165)..(1165): n is a, c, g, or t
  misc_feature (1168)..(1168): n is a, c, g, or t
  misc_feature (1173)..(1175): n is a, c, g, or t
  misc_feature (1180)..(1180): n is a, c, g, or t
  misc_feature (1184)..(1184): n is a, c, g, or t
  misc_feature (1186)..(1186): n is a, c, g, or t
  misc_feature (1188)..(1189): n is a, c, g, or t
  misc_feature (1198)..(1198): n is a, c, g, or t
tagagaaattactatgagaggatcgcatcaccatcaccatcacggatcctatttaggtgacactatagaatcgtcgacccacgcgtccgcgctaccagctccccgctgccctgcgctcggcgcgctggcatccggcccgggggaaagcggaccagcccttctgcaggtctgcggggccaagtgtcccggcggcgcacctcgtggcgagaatcgggagaaggaggagactacaaggataggcccaggagtaatggagtccaaagagaaacgagcagtaaacagtctcagcatggaaaatgccaaccaagaaaatgaagaaaaggagcaagttgctaataaaggggagcccttggccctccctttggatgctggtgaatactgtgtgcctagaggaaatcgtaggcggttccgcgttaggcagcccatcctgcagtatagatgggatatgatgcataggcttggagaaccacaggcaaggatgagagaagagaatatggaaaggattggggaggaggtgagacagctgatggaaaagctgagggaaaagcagttgagtcatagtctgcgggcagtcagcactgacccccctcaccatgaccatcatgatgagttttgccttatgccctgaatcctgatggtttccctaaagttattacggaaacagacccctgctttcgaatttacatgttcatgatgtgcccttgttgtaaacctttacctgtcacttgtttacgtgggtctcctattaccagcttctaattgaatattgtgtttttgaaccagtctgtaagatttttgttancanaagaattttacctattgcatggaaagatgctcattatagtgaagttaataaagcacctttaaaaagccaaaaannnnnnnnnnnannnnnnnnnnnnaggggcggccgctccntatagtgagtcgtatnaanctnattanctgancttggactcntgttnataaatccngtaatgacctccnaaactccctctggatttnttcaaaacnctcggtngccnccgggcgtttttttnttgggggaaaatccaanctancttggcnnaattttcnggancttanggaancttaaattggaaaaaaaattcctggnanntcccccngtttaanttcccnatggnctcntnaaaaaaantttngnggntttcnnncgttncccnangnncctaaaacnaa

SEQ ID NO: 876 - DNA, 970 bp, Homo Sapiens
  misc_feature (880)..(880): n is a, c, g, or t
  misc_feature (896)..(896): n is a, c, g, or t
  misc_feature (908)..(908): n is a, c, g, or t
  misc_feature (935)..(935): n is a, c, g, or t
  misc_feature (955)..(955): n is a, c, g, or t
  misc_feature (957)..(957): n is a, c, g, or t
  misc_feature (962)..(962): n is a, c, g, or t
  misc_feature (970)..(970): n is a, c, g, or t
tagagaaattactatgagaggatcgcatcaccatcaccatcacggatcctatttaggtgacactatagaatcgtcgacccacgcgtccgcccacgcgtccgcggcgcccagcggagggtggaacggcgtcggcgcgagcttgtgggccgcgctgctcctaggggccgtggcgctgaggccggcggaggcggtgtccgagcccacgacggtggcgtttgacgtgcggcccggcggcgtcgtgcattccttctcccataacgtgggcccgggggacaaatatacgtgtatgttcacttacgcctctcaaggagggaccaatgagcaatggcagatgagtctggggaccagcgaagaccaccagcacttcacctgcaccatctggaggccccaggggaagtcctatctgtacttcacacagttcaaggcagaggtgcggggcgctgagattgagtacgccatggcctactctaaagccgcatttgaaagggaaagtgatgtccctctgaaaactgaggaatttgaagtgaccaaaacagcagtggctcacaggcccggggcattcaaagctgagctgtccaagctggtgattgtggccaaggcatcgcgcactgagctgtgaccagcagccctgttgcgggtggcaccttctcatctccggtgaagctgaaggggcctgtgtccctgaaagggccagcacatcactggttttctaggagggactcttaagttttctacctgggctgacgttgccttgtccggaggggcttgcagggtggctgaagccctggggcagagaacagagggtccagggccctcctggctcccaacagcttctcagttcccacttcctgctgagctcttctggaactcaggatcgcanatccggggcacaaaanagggtggggaanatggggggctatgctgggggaaagcanccatgctccccccgacctcnanccaancatccttn

SEQ ID NO: 877 - DNA, 1405 bp, Homo Sapiens
  misc_feature (632)..(632): n is a, c, g, or t
  misc_feature (783)..(783): n is a, c, g, or t
  misc_feature (862)..(862): n is a, c, g, or t
  misc_feature (874)..(874): n is a, c, g, or t
  misc_feature (877)..(877): n is a, c, g, or t
  misc_feature (890)..(890): n is a, c, g, or t
  misc_feature (892)..(893): n is a, c, g, or t
  misc_feature (901)..(901): n is a, c, g, or t
  misc_feature (909)..(909): n is a, c, g, or t
  misc_feature (911)..(911): n is a, c, g, or t
  misc_feature (924)..(924): n is a, c, g, or t
  misc_feature (934)..(934): n is a, c, g, or t
  misc_feature (938)..(938): n is a, c, g, or t
  misc_feature (940)..(941): n is a, c, g, or t
  misc_feature (945)..(947): n is a, c, g, or t
  misc_feature (959)..(959): n is a, c, g, or t
  misc_feature (976)..(976): n is a, c, g, or t
  misc_feature (980)..(980): n is a, c, g, or t
  misc_feature (989)..(989): n is a, c, g, or t
  misc_feature (992)..(992): n is a, c, g, or t
  misc_feature (995)..(997): n is a, c, g, or t
  misc_feature (999)..(999): n is a, c, g, or t
  misc_feature (1004)..(1004): n is a, c, g, or t
  misc_feature (1011)..(1012): n is a, c, g, or t
  misc_feature (1015)..(1016): n is a, c, g, or t
  misc_feature (1019)..(1019): n is a, c, g, or t
  misc_feature (1022)..(1023): n is a, c, g, or t
  misc_feature (1031)..(1031): n is a, c, g, or t
  misc_feature (1035)..(1035): n is a, c, g, or t
  misc_feature (1037)..(1037): n is a, c, g, or t
  misc_feature (1042)..(1042): n is a, c, g, or t
  misc_feature (1045)..(1045): n is a, c, g, or t
  misc_feature (1047)..(1048): n is a, c, g, or t
  misc_feature (1050)..(1050): n is a, c, g, or t
  misc_feature (1055)..(1055): n is a, c, g, or t
  misc_feature (1057)..(1057): n is a, c, g, or t
  misc_feature (1063)..(1063): n is a, c, g, or t
  misc_feature (1066)..(1068): n is a, c, g, or t
  misc_feature (1070)..(1070): n is a, c, g, or t
  misc_feature (1077)..(1077): n is a, c, g, or t
  misc_feature (1081)..(1081): n is a, c, g, or t
  misc_feature (1085)..(1086): n is a, c, g, or t
  misc_feature (1094)..(1094): n is a, c, g, or t
  misc_feature (1096)..(1096): n is a, c, g, or t
  misc_feature (1102)..(1102): n is a, c, g, or t
  misc_feature (1107)..(1108): n is a, c, g, or t
  misc_feature (1114)..(1116): n is a, c, g, or t
  misc_feature (1120)..(1122): n is a, c, g, or t
  misc_feature (1132)..(1132): n is a, c, g, or t
  misc_feature (1137)..(1137): n is a, c, g, or t
  misc_feature (1139)..(1139): n is a, c, g, or t
  misc_feature (1141)..(1141): n is a, c, g, or t
  misc_feature (1145)..(1145): n is a, c, g, or t
  misc_feature (1148)..(1148): n is a, c, g, or t
  misc_feature (1154)..(1155): n is a, c, g, or t
  misc_feature (1157)..(1157): n is a, c, g, or t
  misc_feature (1161)..(1168): n is a, c, g, or t
  misc_feature (1170)..(1170): n is a, c, g, or t
  misc_feature (1174)..(1174): n is a, c, g, or t
  misc_feature (1178)..(1178): n is a, c, g, or t
  misc_feature (1181)..(1182): n is a, c, g, or t
  misc_feature (1184)..(1185): n is a, c, g, or t
  misc_feature (1191)..(1191): n is a, c, g, or t
  misc_feature (1193)..(1193): n is a, c, g, or t
  misc_feature (1198)..(1202): n is a, c, g, or t
  misc_feature (1204)..(1206): n is a, c, g, or t
  misc_feature (1212)..(1212): n is a, c, g, or t
  misc_feature (1216)..(1216): n is a, c, g, or t
  misc_feature (1220)..(1222): n is a, c, g, or t
  misc_feature (1224)..(1226): n is a, c, g, or t
  misc_feature (1231)..(1231): n is a, c, g, or t
  misc_feature (1233)..(1233): n is a, c, g, or t
  misc_feature (1235)..(1237): n is a, c, g, or t
  misc_feature (1242)..(1243): n is a, c, g, or t
  misc_feature (1251)..(1252): n is a, c, g, or t
  misc_feature (1254)..(1254): n is a, c, g, or t
  misc_feature (1257)..(1258): n is a, c, g, or t
  misc_feature (1265)..(1265): n is a, c, g, or t
  misc_feature (1267)..(1267): n is a, c, g, or t
  misc_feature (1269)..(1269): n is a, c, g, or t
  misc_feature (1271)..(1272): n is a, c, g, or t
  misc_feature (1279)..(1280): n is a, c, g, or t
  misc_feature (1284)..(1287): n is a, c, g, or t
  misc_feature (1292)..(1296): n is a, c, g, or t
  misc_feature (1298)..(1298): n is a, c, g, or t
  misc_feature (1302)..(1303): n is a, c, g, or t
  misc_feature (1307)..(1308): n is a, c, g, or t
  misc_feature (1310)..(1314): n is a, c, g, or t
  misc_feature (1316)..(1324): n is a, c, g, or t
  misc_feature (1329)..(1331): n is a, c, g, or t
  misc_feature (1336)..(1336): n is a, c, g, or t
  misc_feature (1340)..(1343): n is a, c, g, or t
  misc_feature (1345)..(1345): n is a, c, g, or t
  misc_feature (1348)..(1348): n is a, c, g, or t
  misc_feature (1355)..(1356): n is a, c, g, or t
  misc_feature (1358)..(1358): n is a, c, g, or t
  misc_feature (1360)..(1364): n is a, c, g, or t
  misc_feature (1366)..(1371): n is a, c, g, or t
  misc_feature (1374)..(1374): n is a, c, g, or t
  misc_feature (1376)..(1376): n is a, c, g, or t
  misc_feature (1379)..(1379): n is a, c, g, or t
  misc_feature (1381)..(1381): n is a, c, g, or t
  misc_feature (1383)..(1383): n is a, c, g, or t
  misc_feature (1385)..(1385): n is a, c, g, or t
  misc_feature (1388)..(1388): n is a, c, g, or t
  misc_feature (1392)..(1394): n is a, c, g, or t
  misc_feature (1396)..(1396): n is a, c, g, or t
  misc_feature (1401)..(1405): n is a, c, g, or t
cgaatagagagattactatgagaggatcgcatcaccatcaccatcacggatcctatttaggtgacactatagaatcgtcgacccacgcgtccgcccacgcgtccgccgactaccgccagaatgtctacatcccaggcagcaatgccacactgaccaacgcagctggcaagcgggatggcaaggccccagcaggtggcaatggcaacaagaagaagtcgggcaagaaggagaagaagtaacatggaggccaggccaagagccacagggcggcctctccccaaccagcccagcttctccttacctgcacccaggcctcagagtttcagggctaacccccagaatactggtaggggccaaggccatgctccccttgggaaacagaaacaagtgcccagtcagcacctaccccttcccccccagggggttgaatatgcaaaagcagttccgctgggaacccccatccaatcaactgctgtacccatgggggtagtggggttactgtagacaccaagaaccatttgccacaccccgtttagttacagctgaactcctccatcttccaaatcaatcaggcccatccatcccatgcctccctcctccccaccccactccaacagttcctctttcccgantaaggtggttggggtgttgaagtaccaagtaacctacaagcctcctagttctgaaaagttggaagggcatcatgacctcttggcctctcctttgattctcaatcttcccccaaaagcatggtttggtgccagccccttcacctccttccanagcccaagatcaatgctcaagttttggaggacatgatcaccatccccatggtactgatgcttgctggatttaggagggnatttttgctacnaancctcttcccaacncnntgggggancaatcttncngttttgttttttnattgtttgantttncnnctgnnntgccttgaattnccccaccttccttcttnaaanaaaaaattncantgnnntntttcnaaaaaannttnnggntgnnaaaaaaangaangnaaatnttntnnantttgnanggtggnggnnntnaaaaatnttanactnnatttttangncttttnaaaanncttttnnnttcnnngggaattaanaattntntnaatnccncctaanncnatannnnnnnngnactnttcnttnntnnaaaggntnacccnnnnncnnntttttnttantaannncnnngattnantnnnttttnncaagaaanntnaannttttaananantnntttaaannaaannnnccttnnnnntnttannaaanncnnnnnannnnnnnnnccctnnnaaggncccnnnntnttntcctttnnanannnnntnnnnnnaananaantntnantgntttnnntntcttnnnnn

SEQ ID NO: 878 - DNA, 1200 bp, Homo Sapiens
  misc_feature (1)..(2): n is a, c, g, or t
  misc_feature (847)..(847): n is a, c, g, or t
  misc_feature (850)..(850): n is a, c, g, or t
  misc_feature (897)..(897): n is a, c, g, or t
  misc_feature (906)..(906): n is a, c, g, or t
  misc_feature (917)..(917): n is a, c, g, or t
  misc_feature (929)..(929): n is a, c, g, or t
  misc_feature (937)..(937): n is a, c, g, or t
  misc_feature (954)..(954): n is a, c, g, or t
  misc_feature (960)..(960): n is a, c, g, or t
  misc_feature (967)..(967): n is a, c, g, or t
  misc_feature (986)..(986): n is a, c, g, or t
  misc_feature (993)..(993): n is a, c, g, or t
  misc_feature (1003)..(1003): n is a, c, g, or t
  misc_feature (1009)..(1009): n is a, c, g, or t
  misc_feature (1013)..(1013): n is a, c, g, or t
  misc_feature (1015)..(1015): n is a, c, g, or t
  misc_feature (1021)..(1021): n is a, c, g, or t
  misc_feature (1025)..(1025): n is a, c, g, or t
  misc_feature (1038)..(1038): n is a, c, g, or t
  misc_feature (1046)..(1046): n is a, c, g, or t
  misc_feature (1049)..(1049): n is a, c, g, or t
  misc_feature (1052)..(1052): n is a, c, g, or t
  misc_feature (1073)..(1073): n is a, c, g, or t
  misc_feature (1086)..(1086): n is a, c, g, or t
  misc_feature (1101)..(1102): n is a, c, g, or t
  misc_feature (1105)..(1105): n is a, c, g, or t
  misc_feature (1113)..(1115): n is a, c, g, or t
  misc_feature (1120)..(1121): n is a, c, g, or t
  misc_feature (1124)..(1124): n is a, c, g, or t
  misc_feature (1136)..(1136): n is a, c, g, or t
  misc_feature (1147)..(1147): n is a, c, g, or t
  misc_feature (1149)..(1150): n is a, c, g, or t
  misc_feature (1153)..(1153): n is a, c, g, or t
  misc_feature (1158)..(1158): n is a, c, g, or t
  misc_feature (1162)..(1162): n is a, c, g, or t
  misc_feature (1166)..(1166): n is a, c, g, or t
  misc_feature (1170)..(1170): n is a, c, g, or t
  misc_feature (1174)..(1174): n is a, c, g, or t
  misc_feature (1178)..(1179): n is a, c, g, or t
  misc_feature (1183)..(1183): n is a, c, g, or t
  misc_feature (1188)..(1188): n is a, c, g, or t
  misc_feature (1190)..(1192): n is a, c, g, or t
  misc_feature (1197)..(1197): n is a, c, g, or t
nnattagagaaaattactatgagaggatcgcatcaccatcaccatcacggatcctatttaggtgacactatagaatcgtcgacccacgcgtccggaacaacagccccgccctgcccatcggcagtgtcagcgccacagacagagactcaggcaccaacgcccaggtcatctactccctgctgccgtcccaggacccgcacctgcccctcgcctccctggtctccatcaacgcggacaacggccacctgtttgccctcaggtccctggactacgaggccctgcaggcgttcgagttccgggtgggcgccacagaccgcggctcccccgcgctgagcagcgaggcgctggtgcgcgtgctggtgctggacgccaacgacaactcgcccttcgtgctgtacccgctgcagaacagctccgcgccctgcaccgagccgttgccccgggcggccgagccgggctacctggtgaccaaggtggtggcggtggacggcgactcgggccagaacgcctggctgtcgtaccagctgctcaaggccacggagcccgggctattcggcgtgtgggcgcacaatggcgaggtgcgtaccgccaggctgctgagcgagcgcgacgcagccaagcagaggctggtggtgctggtcaaggacaatggcgagcctccgcgctcggccaccgccacgctgcacgtgctcctggtggacggcttctcccagccctacctgcggctcccggaggcggccccggaccaggccaactcgctcaccgtctacctggtggtggcgttggcctcggtgtcttcgctcttcctcctctcggtgctcctgttcgtggcggtgcggctgtgcangangaactgggcggccccggtggggtcgctgctcggtgcctgagggcccntttcacganatctggtgganttgaacggcacngggaaccntatcccaaaactaccantatgangtgtgcntgattggaggctccggganaaatganttcaagtttntgaaancaantnatcccnaacntgctacccaaaanaaaggganggnaantggaaaaaaatcccccatttnaaaaaaatttggnttttgaaaaaaaatnnaantaaatccnnnttggnnaanacttttttgaanaaaaatttttngnnagnttccntaanggangggntttnaatnntttnaaaangnnnccttngaa

SEQ ID NO: 879 - DNA, 1364 bp, Homo Sapiens
  misc_feature (1)..(1): n is a, c, g, or t
  misc_feature (4)..(12): n is a, c, g, or t
  misc_feature (1035)..(1035): n is a, c, g, or t
  misc_feature (1042)..(1042): n is a, c, g, or t
  misc_feature (1044)..(1044): n is a, c, g, or t
  misc_feature (1079)..(1079): n is a, c, g, or t
  misc_feature (1090)..(1090): n is a, c, g, or t
  misc_feature (1098)..(1098): n is a, c, g, or t
  misc_feature (1104)..(1104): n is a, c, g, or t
  misc_feature (1115)..(1116): n is a, c, g, or t
  misc_feature (1139)..(1139): n is a, c, g, or t
  misc_feature (1142)..(1142): n is a, c, g, or t
  misc_feature (1149)..(1149): n is a, c, g, or t
  misc_feature (1157)..(1157): n is a, c, g, or t
  misc_feature (1170)..(1170): n is a, c, g, or t
  misc_feature (1172)..(1172): n is a, c, g, or t
  misc_feature (1177)..(1178): n is a, c, g, or t
  misc_feature (1185)..(1185): n is a, c, g, or t
  misc_feature (1188)..(1188): n is a, c, g, or t
  misc_feature (1193)..(1193): n is a, c, g, or t
  misc_feature (1201)..(1201): n is a, c, g, or t
  misc_feature (1203)..(1203): n is a, c, g, or t
  misc_feature (1213)..(1213): n is a, c, g, or t
  misc_feature (1220)..(1220): n is a, c, g, or t
  misc_feature (1222)..(1222): n is a, c, g, or t
  misc_feature (1225)..(1225): n is a, c, g, or t
  misc_feature (1227)..(1227): n is a, c, g, or t
  misc_feature (1230)..(1230): n is a, c, g, or t
  misc_feature (1233)..(1234): n is a, c, g, or t
  misc_feature (1246)..(1246): n is a, c, g, or t
  misc_feature (1268)..(1268): n is a, c, g, or t
  misc_feature (1277)..(1278): n is a, c, g, or t
  misc_feature (1282)..(1282): n is a, c, g, or t
  misc_feature (1284)..(1287): n is a, c, g, or t
  misc_feature (1300)..(1301): n is a, c, g, or t
  misc_feature (1307)..(1307): n is a, c, g, or t
  misc_feature (1315)..(1315): n is a, c, g, or t
  misc_feature (1322)..(1322): n is a, c, g, or t
  misc_feature (1339)..(1341): n is a, c, g, or t
  misc_feature (1347)..(1347): n is a, c, g, or t
  misc_feature (1353)..(1353): n is a, c, g, or t
  misc_feature (1358)..(1358): n is a, c, g, or t
  misc_feature (1364)..(1364): n is a, c, g, or t
nttnnnnnnnnnaatagagaaattactatgagaggatcgcatcaccatcaccatcacggatcctatttaggtgacactatagaatcgtcgacccacgcgtccgaggacagcgaggaggtccggaggatctggaaccgagcaatacctctctgggagctgcctgatcaggaggaggttcagctggctgatacaatgtttggccttaccaaggttacagatgacacactcaagcgtttcagtgtgcgatatctgcgacctgctcgcagtcttgtcttcccttggttctcccctgggggctcaggattacgaggcctgaagctcctagaggctaaatgccagggggatggagtgagctacgaggaaaccactattccccgacccagcgcctaccacaatctgtttggattaccactgattagtcgtcgagatgctgaggtggtactgacgagtcgtgagcttgacagcctggccttgaaccagtccacggggctgcctacccttactctaccccgaggaacgacctgcttaccccctgccttactcccttacctggaacagttccggcggattgtattctggttgggggatgaccttcggtcctgggaagccgccaagttgtttgcacgaaaactgaaccccaaacgatgcttcttggtgcgaccaggagaccagcaaccccgtcccctggaggccctgaacggaggcttcaatctttctcgtattcttcgtaccgccctgcctgcctggcacaagtccatcgtatctttccggcagcttcgggaggaggtgctaggagaactgtcaaatgtggagcaagcagctggcctccgctggagccgctttccagacctcaatcgtatcttgaagggacatcgaaagggcgagctgacggtcttcacagggccaacaggcagtggaaagacgacattcatcagtgagtatgcccctggatttgtgttcccagggggtgaacacactgtgggggtagcttcgagatcagcaatgtgagactagcccggggtcatgctgacacantttgccnangggcggctggaaaatcaactggacaaatatgatcnctgggctgacnctttgagnacctgnccccttatttnntgactttcctgggaagcaaagcntcnggactgnaaaaaaanaatgcacatggcngnccacnnttagaanttntcctngggaaccncncaaacctgcntttttgnanggntnaanaannttttcccaaaangattcccctcaaaaaaattttnggggttttnngaantnnnnaaaaaaaaaggcnngggacnggggtttnccccccnaaaaaaaaaaaaaaatnnnaccccntttttntcccnaaaagn

SEQ ID NO: 880 - DNA, 1387 bp, Homo Sapiens
  misc_feature (896)..(896): n is a, c, g, or t
  misc_feature (899)..(899): n is a, c, g, or t
  misc_feature (931)..(931): n is a, c, g, or t
  misc_feature (940)..(940): n is a, c, g, or t
  misc_feature (949)..(949): n is a, c, g, or t
  misc_feature (957)..(957): n is a, c, g, or t
  misc_feature (966)..(966): n is a, c, g, or t
  misc_feature (970)..(970): n is a, c, g, or t
  misc_feature (982)..(982): n is a, c, g, or t
  misc_feature (985)..(985): n is a, c, g, or t
  misc_feature (994)..(994): n is a, c, g, or t
  misc_feature (997)..(997): n is a, c, g, or t
  misc_feature (1000)..(1000): n is a, c, g, or t
  misc_feature (1002)..(1002): n is a, c, g, or t
  misc_feature (1034)..(1034): n is a, c, g, or t
  misc_feature (1040)..(1040): n is a, c, g, or t
  misc_feature (1046)..(1046): n is a, c, g, or t
  misc_feature (1071)..(1071): n is a, c, g, or t
  misc_feature (1090)..(1090): n is a, c, g, or t
  misc_feature (1108)..(1108): n is a, c, g, or t
  misc_feature (1135)..(1135): n is a, c, g, or t
  misc_feature (1137)..(1137): n is a, c, g, or t
  misc_feature (1142)..(1142): n is a, c, g, or t
  misc_feature (1156)..(1156): n is a, c, g, or t
  misc_feature (1163)..(1163): n is a, c, g, or t
  misc_feature (1168)..(1168): n is a, c, g, or t
  misc_feature (1170)..(1170): n is a, c, g, or t
  misc_feature (1178)..(1178): n is a, c, g, or t
  misc_feature (1202)..(1202): n is a, c, g, or t
  misc_feature (1212)..(1213): n is a, c, g, or t
  misc_feature (1219)..(1219): n is a, c, g, or t
  misc_feature (1222)..(1222): n is a, c, g, or t
  misc_feature (1224)..(1224): n is a, c, g, or t
  misc_feature (1229)..(1230): n is a, c, g, or t
  misc_feature (1232)..(1232): n is a, c, g, or t
  misc_feature (1234)..(1234): n is a, c, g, or t
  misc_feature (1236)..(1236): n is a, c, g, or t
  misc_feature (1238)..(1238): n is a, c, g, or t
  misc_feature (1240)..(1240): n is a, c, g, or t
  misc_feature (1242)..(1243): n is a, c, g, or t
  misc_feature (1258)..(1258): n is a, c, g, or t
  misc_feature (1260)..(1260): n is a, c, g, or t
  misc_feature (1264)..(1264): n is a, c, g, or t
  misc_feature (1271)..(1271): n is a, c, g, or t
  misc_feature (1273)..(1274): n is a, c, g, or t
  misc_feature (1283)..(1285): n is a, c, g, or t
  misc_feature (1289)..(1289): n is a, c, g, or t
  misc_feature (1295)..(1295): n is a, c, g, or t
  misc_feature (1301)..(1303): n is a, c, g, or t
  misc_feature (1305)..(1306): n is a, c, g, or t
  misc_feature (1310)..(1312): n is a, c, g, or t
  misc_feature (1317)..(1317): n is a, c, g, or t
  misc_feature (1323)..(1324): n is a, c, g, or t
  misc_feature (1329)..(1330): n is a, c, g, or t
  misc_feature (1334)..(1335): n is a, c, g, or t
  misc_feature (1346)..(1346): n is a, c, g, or t
  misc_feature (1351)..(1351): n is a, c, g, or t
  misc_feature (1357)..(1357): n is a, c, g, or t
  misc_feature (1365)..(1366): n is a, c, g, or t
  misc_feature (1373)..(1373): n is a, c, g, or t
  misc_feature (1381)..(1381): n is a, c, g, or t
  misc_feature (1383)..(1384): n is a, c, g, or t
atagagagattactatgagaggatcgcatcaccatcaccatcacggatcctatttaggtgacactatagaatcgtcgacccacgcgtccgagcggatgcaggctcagctcctggaactccggacaaacaactaccagctttcagatgaactacgcaagaatggtgttgaactcaccagtcttcgacagaaggtcgcctacttggataaggagttcagcaaagctcagaaggcactgagcaagagcaagaaagctcaggaagtcgaggtattgctgagtgaaaatgagatgctgcaggcaaagctgcacagccaggaggaggacttccgtttgcagaacagcacactaatggccgagttcagcaagctctgcagccagatggaacagctggagcaagagaaccagcaactgaaggagggggctgcaggagcaggggttgcccaagctgggcccctcgtggatggggagctgctgaggctacaggctgaaaacacagccttgcagaagaacgtggcagccctgcaggaacgctatgggaaagaggccgggaagttctcagctgtcagtgagggccagggggatcccccagggggcccggcccccaccgtcctggcccccatgccgttggcagaggtggagctgaaatgggaaatggagaaagaggagaagagattgctctgggaacagctgcaaggcttagagagctcaaagcaggccgaaacatccaggctgcaggaggaacttgctaagctctccgagaaactgaaaaagaaacaagaaagtttttgccgtctgcagacagaaaaggagactctgtttaatgacagcaggaacaagattgaggaattacaacaacggaaggaagctgatcacaaagcccagttggctcgaacccanaanctgcagcaggaacttgaggctgccaatcagancttggccanaactgaaanatcaccgncagggggancgcntggaacatgcancanctttgcggnccntananatcaggtatccttccaaatgcaaatgcccagnaacaantggaanggctttttgctgaaaaaatgccttnaagactaacctggctgccntggaacaatccaacaccnaaaacccaaaactgaaattgctccggnanaaacncttggcctgcactnaatttcnccccncngcttaatnaagactttggaaaaaaaaaacccnctcccctccnnaatttncgncnaatcnntngngnancntnnaaaaaggcggaaagnantttncccattncnngcccaaatnnnaaanaagccnttttannnannaacnnnaaaanccccannaaggnncttnncctaaaagggnggggnccctangccccaannaaaaacnggacctgntnngaa

SEQ ID NO: 881 - DNA, 1367 bp, Homo Sapiens
  misc_feature (871)..(871): n is a, c, g, or t
  misc_feature (884)..(884): n is a, c, g, or t
  misc_feature (891)..(891): n is a, c, g, or t
  misc_feature (942)..(942): n is a, c, g, or t
  misc_feature (1011)..(1011): n is a, c, g, or t
  misc_feature (1024)..(1024): n is a, c, g, or t
  misc_feature (1030)..(1030): n is a, c, g, or t
  misc_feature (1037)..(1037): n is a, c, g, or t
  misc_feature (1041)..(1041): n is a, c, g, or t
  misc_feature (1043)..(1043): n is a, c, g, or t
  misc_feature (1052)..(1052): n is a, c, g, or t
  misc_feature (1067)..(1067): n is a, c, g, or t
  misc_feature (1076)..(1076): n is a, c, g, or t
  misc_feature (1080)..(1080): n is a, c, g, or t
  misc_feature (1112)..(1112): n is a, c, g, or t
  misc_feature (1118)..(1118): n is a, c, g, or t
  misc_feature (1120)..(1120): n is a, c, g, or t
  misc_feature (1123)..(1123): n is a, c, g, or t
  misc_feature (1129)..(1129): n is a, c, g, or t
  misc_feature (1132)..(1132): n is a, c, g, or t
  misc_feature (1137)..(1137): n is a, c, g, or t
  misc_feature (1144)..(1144): n is a, c, g, or t
  misc_feature (1146)..(1146): n is a, c, g, or t
  misc_feature (1150)..(1151): n is a, c, g, or t
  misc_feature (1153)..(1153): n is a, c, g, or t
  misc_feature (1170)..(1170): n is a, c, g, or t
  misc_feature (1174)..(1174): n is a, c, g, or t
  misc_feature (1183)..(1183): n is a, c, g, or t
  misc_feature (1185)..(1186): n is a, c, g, or t
  misc_feature (1195)..(1195): n is a, c, g, or t
  misc_feature (1198)..(1198): n is a, c, g, or t
  misc_feature (1200)..(1200): n is a, c, g, or t
  misc_feature (1208)..(1208): n is a, c, g, or t
  misc_feature (1214)..(1214): n is a, c, g, or t
  misc_feature (1221)..(1221): n is a, c, g, or t
  misc_feature (1223)..(1223): n is a, c, g, or t
  misc_feature (1231)..(1231): n is a, c, g, or t
  misc_feature (1233)..(1233): n is a, c, g, or t
  misc_feature (1235)..(1236): n is a, c, g, or t
  misc_feature (1240)..(1240): n is a, c, g, or t
  misc_feature (1260)..(1263): n is a, c, g, or t
  misc_feature (1265)..(1266): n is a, c, g, or t
  misc_feature (1271)..(1272): n is a, c, g, or t
  misc_feature (1277)..(1278): n is a, c, g, or t
  misc_feature (1281)..(1282): n is a, c, g, or t
  misc_feature (1284)..(1285): n is a, c, g, or t
  misc_feature (1287)..(1289): n is a, c, g, or t
  misc_feature (1293)..(1293): n is a, c, g, or t
  misc_feature (1296)..(1296): n is a, c, g, or t
  misc_feature (1302)..(1305): n is a, c, g, or t
  misc_feature (1310)..(1310): n is a, c, g, or t
  misc_feature (1314)..(1315): n is a, c, g, or t
  misc_feature (1317)..(1317): n is a, c, g, or t
  misc_feature (1321)..(1321): n is a, c, g, or t
  misc_feature (1324)..(1324): n is a, c, g, or t
  misc_feature (1328)..(1331): n is a, c, g, or t
  misc_feature (1337)..(1337): n is a, c, g, or t
  misc_feature (1340)..(1340): n is a, c, g, or t
  misc_feature (1342)..(1342): n is a, c, g, or t
  misc_feature (1344)..(1344): n is a, c, g, or t
  misc_feature (1347)..(1358): n is a, c, g, or t
  misc_feature (1360)..(1360): n is a, c, g, or t
  misc_feature (1367)..(1367): n is a, c, g, or t
gagaaattactatgagaggatcgcatcaccatcaccatcacggatcctatttaggtgacactatagaatcgtcgacccacgcgtccgggcaagcagaagtgacccgtctcttgctggagggaatcagtagcactcacgtgaaccacctgcgctgcctccacgagttcgtcaagtctcagacaacctactacgcacagtgctaccgccacatgctggacttgcagaagcagctgggcagatttcccggcaccttcgtgggcaccacagagcccgcctccccacccctgagcagcacctcacccaccactgctgcggccactatgcctgtggtgccctctgtggccagcctggcccctccgggggaggcctcgctctgcctggaagaggtggccccccctgccagtgggacccgcaaagctcgggtgctctatgactacgaggcagccgacagcagtgagctggccctgctggctgatgagctcatcactgtctacagcctgcctggcatggaccctgactggctcattggcgagagaggcaacaagaagggcaaggtccctgtcacctacttggaactgctcagctaggcaggtgcccccatcccccccgcattctggcctaggcaggagaggatgggcgcagccctgccacttaacttgtttgttggtgacacagttgttcagagtggggagaattcaccccattctgtccctgcccctagtcacctagctgtgagggtgcctgaggctgaatggctccacccctcccccagccctgcttctgacctgtggctctggagcccctgcccctgcctgcatccccgagcaccccaccctccaggctccactaaggagggaggggctgtctgcancagctgcactcancacctangccagggtggggccgccgcaaatgggctcaggaaaccccaggtgcactcancgagagccctgcctttcagttgccaaaagctgcatcaggggaatgcggcaaggcacaaagggctctggnaacccctggggantgggcnctgcccntggnangggaaaacntggccaaggctggtnttgggcccngaanaacattttcgggggtatcctcccctccacccntcaaantnaancaaatncanggccnttcccanangganncnaataaacttaataactnactnggaatcctntnnaaaaatccnaangnccccaaantccttnggatttntnaaaacctngntnncccngggttttttttgggaaaacnnnntnnttggnnatttnnggnntnngnnntaanggnaaaaannnnggatncccnntnaatnccngggnnnnaaaaanttngngnttnnnnnnnnnnnnanaaaaaan

SEQ ID NO: 882 - DNA, 1388 bp, Homo Sapiens
  misc_feature (763)..(763): n is a, c, g, or t
  misc_feature (837)..(837): n is a, c, g, or t
  misc_feature (846)..(846): n is a, c, g, or t
  misc_feature (908)..(908): n is a, c, g, or t
  misc_feature (944)..(944): n is a, c, g, or t
  misc_feature (951)..(951): n is a, c, g, or t
  misc_feature (973)..(974): n is a, c, g, or t
  misc_feature (984)..(984): n is a, c, g, or t
  misc_feature (994)..(994): n is a, c, g, or t
  misc_feature (999)..(1000): n is a, c, g, or t
  misc_feature (1004)..(1004): n is a, c, g, or t
  misc_feature (1009)..(1009): n is a, c, g, or t
  misc_feature (1020)..(1021): n is a, c, g, or t
  misc_feature (1027)..(1027): n is a, c, g, or t
  misc_feature (1029)..(1029): n is a, c, g, or t
  misc_feature (1059)..(1059): n is a, c, g, or t
  misc_feature (1061)..(1061): n is a, c, g, or t
  misc_feature (1064)..(1064): n is a, c, g, or t
  misc_feature (1067)..(1067): n is a, c, g, or t
  misc_feature (1072)..(1072): n is a, c, g, or t
  misc_feature (1074)..(1074): n is a, c, g, or t
  misc_feature (1076)..(1076): n is a, c, g, or t
  misc_feature (1080)..(1081): n is a, c, g, or t
  misc_feature (1083)..(1083): n is a, c, g, or t
  misc_feature (1100)..(1100): n is a, c, g, or t
  misc_feature (1107)..(1107): n is a, c, g, or t
  misc_feature (1113)..(1113): n is a, c, g, or t
  misc_feature (1123)..(1123): n is a, c, g, or t
  misc_feature (1134)..(1134): n is a, c, g, or t
  misc_feature (1141)..(1141): n is a, c, g, or t
  misc_feature (1144)..(1146): n is a, c, g, or t
  misc_feature (1149)..(1149): n is a, c, g, or t
  misc_feature (1156)..(1156): n is a, c, g, or t
  misc_feature (1162)..(1162): n is a, c, g, or t
  misc_feature (1166)..(1166): n is a, c, g, or t
  misc_feature (1168)..(1168): n is a, c, g, or t
  misc_feature (1178)..(1178): n is a, c, g, or t
  misc_feature (1189)..(1189): n is a, c, g, or t
  misc_feature (1195)..(1196): n is a, c, g, or t
  misc_feature (1199)..(1201): n is a, c, g, or t
  misc_feature (1206)..(1207): n is a, c, g, or t
  misc_feature (1210)..(1210): n is a, c, g, or t
  misc_feature (1214)..(1214): n is a, c, g, or t
  misc_feature (1218)..(1219): n is a, c, g, or t
  misc_feature (1222)..(1225): n is a, c, g, or t
  misc_feature (1230)..(1231): n is a, c, g, or t
  misc_feature (1233)..(1233): n is a, c, g, or t
  misc_feature (1240)..(1240): n is a, c, g, or t
  misc_feature (1243)..(1243): n is a, c, g, or t
  misc_feature (1247)..(1249): n is a, c, g, or t
  misc_feature (1260)..(1260): n is a, c, g, or t
  misc_feature (1267)..(1269): n is a, c, g, or t
  misc_feature (1271)..(1271): n is a, c, g, or t
  misc_feature (1280)..(1281): n is a, c, g, or t
  misc_feature (1283)..(1283): n is a, c, g, or t
  misc_feature (1288)..(1290): n is a, c, g, or t
  misc_feature (1292)..(1293): n is a, c, g, or t
  misc_feature (1295)..(1295): n is a, c, g, or t
  misc_feature (1298)..(1298): n is a, c, g, or t
  misc_feature (1300)..(1300): n is a, c, g, or t
  misc_feature (1306)..(1307): n is a, c, g, or t
  misc_feature (1309)..(1313): n is a, c, g, or t
  misc_feature (1316)..(1319): n is a, c, g, or t
  misc_feature (1338)..(1338): n is a, c, g, or t
  misc_feature (1344)..(1344): n is a, c, g, or t
  misc_feature (1350)..(1350): n is a, c, g, or t
  misc_feature (1357)..(1357): n is a, c, g, or t
  misc_feature (1361)..(1362): n is a, c, g, or t
  misc_feature (1365)..(1367): n is a, c, g, or t
  misc_feature (1370)..(1371): n is a, c, g, or t
  misc_feature (1377)..(1383): n is a, c, g, or t
  misc_feature (1385)..(1385): n is a, c, g, or t
  misc_feature (1387)..(1388): n is a, c, g, or t
tagagaaattactatgagaggatcgcatcaccatcaccatcacggatcctatttaggtgacactatagaatcgtcgacccacgcgtccgcgcatactgacgccaaaatccgtgctgaaaatggaacagggtccagccctcggggtcctggctgcagcctccggcactttgcctgcgaacagaacctgctgtcgcggccagatggctctgcttccttcctgcaaggtgacacctctgtcctggcgggtgtgtacgggccggccgaggtgaaggtcagcaaagagattttcaacaaggccacactcgaagtgatcctgaggccgaagattgggctgcctggtgttgcagagaagagccgggagcggctgatcaggaacacgtgcgaggcggtggtgctgggcacgttgcacccccgcacctccatcaccgtggtgctgcaggttgtcagcgatgccggctctctcctggcctgttgtctgaatgccgcctgcatggcattggtggatgcaggtgtgcccatgcgggctctcttctgtggggtcgcctgcgccctggactctgatgggaccctcgtgctggatcctacatccaagcaagaaaaggaggcccgggcagtcctgacctttgccctggacagcgtggaacggaagctgctgatgtccagcaccaaggggctctactcagacactgagctccagcagtgcctggctgcggcccaggccgcttcgcaacacgtcttccgtttctaccgggaatcgctgcanaggcgttactccaagagctgaagcaagctggggcaaggggccgctcccattgcctccacccactcaccccctanagcctgaancaaaccagcagcccagccttgcctctctgaaccatgggctccttgagcctgcactctgtaancacagggctcctgtggggaggccttggcctgtgaancccccangcctgggggcacaaatcccccnncaaggataanattcaaaganctccnntttntgaanggatgaaccannaattantncctttaaaaaaaaaaaaaaaaaaaaaaaangnggnccnccccnanangganncnaataacctaaataactnaacttgnaacccnttgaaaaaanccaaaagaacncaaaacnccnnnggnatttttnaaaccnccgntncccccggggntttttttgggnaaaccnnccnnnttggnnaantttngganntannnnctaanngnaaaaaanccnggannnccccttaaaancccaggnnncnaaaaatttnngnttttnnntnncnagncnaaaaanntnnnnnaannnnttttaaaaaaaaaaaaaanttttcncttttntttcccnaaannccnnnttnnaaaaannnnnnnantnn

SEQ ID NO: 883 - DNA, 1636 bp, Homo Sapiens
  misc_feature (3)..(3): n is a, c, g, or t
  misc_feature (6)..(6): n is a, c, g, or t
  misc_feature (53)..(53): n is a, c, g, or t
  misc_feature (90)..(90): n is a, c, g, or t
  misc_feature (93)..(94): n is a, c, g, or t
  misc_feature (97)..(97): n is a, c, g, or t
  misc_feature (107)..(107): n is a, c, g, or t
  misc_feature (109)..(109): n is a, c, g, or t
  misc_feature (111)..(111): n is a, c, g, or t
  misc_feature (114)..(114): n is a, c, g, or t
  misc_feature (121)..(121): n is a, c, g, or t
  misc_feature (134)..(134): n is a, c, g, or t
  misc_feature (137)..(137): n is a, c, g, or t
  misc_feature (162)..(162): n is a, c, g, or t
  misc_feature (184)..(184): n is a, c, g, or t
  misc_feature (216)..(216): n is a, c, g, or t
  misc_feature (231)..(231): n is a, c, g, or t
  misc_feature (233)..(233): n is a, c, g, or t
  misc_feature (249)..(249): n is a, c, g, or t
  misc_feature (253)..(253): n is a, c, g, or t
  misc_feature (259)..(259): n is a, c, g, or t
  misc_feature (262)..(262): n is a, c, g, or t
  misc_feature (267)..(267): n is a, c, g, or t
  misc_feature (269)..(269): n is a, c, g, or t
  misc_feature (272)..(272): n is a, c, g, or t
  misc_feature (283)..(283): n is a, c, g, or t
  misc_feature (285)..(285): n is a, c, g, or t
  misc_feature (288)..(288): n is a, c, g, or t
  misc_feature (294)..(295): n is a, c, g, or t
  misc_feature (297)..(297): n is a, c, g, or t
  misc_feature (299)..(299): n is a, c, g, or t
  misc_feature (304)..(304): n is a, c, g, or t
  misc_feature (307)..(307): n is a, c, g, or t
  misc_feature (310)..(310): n is a, c, g, or t
  misc_feature (314)..(315): n is a, c, g, or t
  misc_feature (317)..(318): n is a, c, g, or t
  misc_feature (325)..(328): n is a, c, g, or t
  misc_feature (330)..(330): n is a, c, g, or t
  misc_feature (333)..(333): n is a, c, g, or t
  misc_feature (338)..(339): n is a, c, g, or t
  misc_feature (344)..(344): n is a, c, g, or t
  misc_feature (347)..(347): n is a, c, g, or t
  misc_feature (355)..(356): n is a, c, g, or t
  misc_feature (360)..(360): n is a, c, g, or t
  misc_feature (363)..(364): n is a, c, g, or t
  misc_feature (367)..(367): n is a, c, g, or t
  misc_feature (372)..(372): n is a, c, g, or t
  misc_feature (376)..(376): n is a, c, g, or t
  misc_feature (378)..(380): n is a, c, g, or t
  misc_feature (382)..(382): n is a, c, g, or t
  misc_feature (387)..(387): n is a, c, g, or t
  misc_feature (391)..(391): n is a, c, g, or t
  misc_feature (395)..(396): n is a, c, g, or t
  misc_feature (404)..(405): n is a, c, g, or t
  misc_feature (407)..(411): n is a, c, g, or t
  misc_feature (414)..(414): n is a, c, g, or t
  misc_feature (422)..(422): n is a, c, g, or t
  misc_feature (427)..(427): n is a, c, g, or t
  misc_feature (429)..(429): n is a, c, g, or t
  misc_feature (438)..(438): n is a, c, g, or t
  misc_feature (442)..(442): n is a, c, g, or t
  misc_feature (445)..(445): n is a, c, g, or t
  misc_feature (451)..(451): n is a, c, g, or t
  misc_feature (460)..(460): n is a, c, g, or t
  misc_feature (463)..(463): n is a, c, g, or t
  misc_feature (468)..(468): n is a, c, g, or t
  misc_feature (471)..(471): n is a, c, g, or t
  misc_feature (474)..(474): n is a, c, g, or t
  misc_feature (478)..(478): n is a, c, g, or t
  misc_feature (483)..(483): n is a, c, g, or t
  misc_feature (497)..(498): n is a, c, g, or t
  misc_feature (505)..(505): n is a, c, g, or t
  misc_feature (507)..(507): n is a, c, g, or t
  misc_feature (509)..(509): n is a, c, g, or t
  misc_feature (511)..(512): n is a, c, g, or t
  misc_feature (515)..(515): n is a, c, g, or t
  misc_feature (517)..(517): n is a, c, g, or t
  misc_feature (520)..(521): n is a, c, g, or t
  misc_feature (527)..(527): n is a, c, g, or t
  misc_feature (529)..(530): n is a, c, g, or t
  misc_feature (539)..(541): n is a, c, g, or t
  misc_feature (545)..(545): n is a, c, g, or t
  misc_feature (547)..(547): n is a, c, g, or t
  misc_feature (550)..(550): n is a, c, g, or t
  misc_feature (555)..(555): n is a, c, g, or t
  misc_feature (564)..(564): n is a, c, g, or t
  misc_feature (568)..(568): n is a, c, g, or t
  misc_feature (575)..(575): n is a, c, g, or t
  misc_feature (577)..(577): n is a, c, g, or t
  misc_feature (581)..(582): n is a, c, g, or t
  misc_feature (587)..(591): n is a, c, g, or t
  misc_feature (594)..(594): n is a, c, g, or t
  misc_feature (596)..(596): n is a, c, g, or t
  misc_feature (601)..(601): n is a, c, g, or t
  misc_feature (604)..(605): n is a, c, g, or t
  misc_feature (609)..(611): n is a, c, g, or t
  misc_feature (617)..(617): n is a, c, g, or t
  misc_feature (622)..(622): n is a, c, g, or t
  misc_feature (625)..(627): n is a, c, g, or t
  misc_feature (631)..(631): n is a, c, g, or t
  misc_feature (633)..(633): n is a, c, g, or t
  misc_feature (635)..(635): n is a, c, g, or t
  misc_feature (638)..(638): n is a, c, g, or t
  misc_feature (642)..(642): n is a, c, g, or t
  misc_feature (646)..(646): n is a, c, g, or t
  misc_feature (648)..(650): n is a, c, g, or t
  misc_feature (652)..(655): n is a, c, g, or t
  misc_feature (671)..(672): n is a, c, g, or t
  misc_feature (676)..(676): n is a, c, g, or t
  misc_feature (688)..(688): n is a, c, g, or t
  misc_feature (692)..(692): n is a, c, g, or t
  misc_feature (696)..(696): n is a, c, g, or t
  misc_feature (703)..(703): n is a, c, g, or t
  misc_feature (708)..(710): n is a, c, g, or t
  misc_feature (712)..(712): n is a, c, g, or t
  misc_feature (714)..(716): n is a, c, g, or t
  misc_feature (718)..(718): n is a, c, g, or t
  misc_feature (728)..(728): n is a, c, g, or t
  misc_feature (733)..(733): n is a, c, g, or t
  misc_feature (736)..(736): n is a, c, g, or t
  misc_feature (738)..(738): n is a, c, g, or t
  misc_feature (740)..(740): n is a, c, g, or t
  misc_feature (745)..(746): n is a, c, g, or t
  misc_feature (751)..(751): n is a, c, g, or t
  misc_feature (755)..(755): n is a, c, g, or t
  misc_feature (757)..(757): n is a, c, g, or t
  misc_feature (762)..(762): n is a, c, g, or t
  misc_feature (766)..(766): n is a, c, g, or t
  misc_feature (773)..(773): n is a, c, g, or t
  misc_feature (777)..(777): n is a, c, g, or t
  misc_feature (780)..(780): n is a, c, g, or t
  misc_feature (783)..(783): n is a, c, g, or t
  misc_feature (787)..(789): n is a, c, g, or t
  misc_feature (791)..(791): n is a, c, g, or t
  misc_feature (795)..(795): n is a, c, g, or t
  misc_feature (797)..(797): n is a, c, g, or t
  misc_feature (804)..(805): n is a, c, g, or t
  misc_feature (807)..(807): n is a, c, g, or t
  misc_feature (810)..(810): n is a, c, g, or t
  misc_feature (815)..(815): n is a, c, g, or t
  misc_feature (817)..(817): n is a, c, g, or t
  misc_feature (819)..(820): n is a, c, g, or t
  misc_feature (822)..(822): n is a, c, g, or t
  misc_feature (824)..(825): n is a, c, g, or t
  misc_feature (829)..(829): n is a, c, g, or t
  misc_feature (831)..(832): n is a, c, g, or t
  misc_feature (834)..(835): n is a, c, g, or t
  misc_feature (838)..(838): n is a, c, g, or t
  misc_feature (841)..(842): n is a, c, g, or t
  misc_feature (844)..(844): n is a, c, g, or t
  misc_feature (847)..(847): n is a, c, g, or t
  misc_feature (850)..(850): n is a, c, g, or t
  misc_feature (853)..(853): n is a, c, g, or t
  misc_feature (857)..(859): n is a, c, g, or t
  misc_feature (861)..(861): n is a, c, g, or t
  misc_feature (863)..(863): n is a, c, g, or t
  misc_feature (865)..(865): n is a, c, g, or t
  misc_feature (872)..(872): n is a, c, g, or t
  misc_feature (875)..(876): n is a, c, g, or t
  misc_feature (879)..(879): n is a, c, g, or t
  misc_feature (881)..(881): n is a, c, g, or t
  misc_feature (883)..(883): n is a, c, g, or t
  misc_feature (885)..(885): n is a, c, g, or t
  misc_feature (887)..(887): n is a, c, g, or t
  misc_feature (889)..(890): n is a, c, g, or t
  misc_feature (896)..(896): n is a, c, g, or t
  misc_feature (900)..(900): n is a, c, g, or t
  misc_feature (908)..(909): n is a, c, g, or t
  misc_feature (922)..(923): n is a, c, g, or t
  misc_feature (933)..(934): n is a, c, g, or t
  misc_feature (947)..(947): n is a, c, g, or t
  misc_feature (954)..(954): n is a, c, g, or t
  misc_feature (956)..(957): n is a, c, g, or t
  misc_feature (960)..(960): n is a, c, g, or t
  misc_feature (962)..(963): n is a, c, g, or t
  misc_feature (966)..(966): n is a, c, g, or t
  misc_feature (971)..(971): n is a, c, g, or t
  misc_feature (977)..(977): n is a, c, g, or t
  misc_feature (979)..(981): n is a, c, g, or t
  misc_feature (983)..(983): n is a, c, g, or t
  misc_feature (985)..(985): n is a, c, g, or t
  misc_feature (988)..(988): n is a, c, g, or t
  misc_feature (996)..(997): n is a, c, g, or t
  misc_feature (1004)..(1004): n is a, c, g, or t
  misc_feature (1008)..(1010): n is a, c, g, or t
  misc_feature (1013)..(1014): n is a, c, g, or t
  misc_feature (1018)..(1018): n is a, c, g, or t
  misc_feature (1020)..(1020): n is a, c, g, or t
  misc_feature (1023)..(1023): n is a, c, g, or t
  misc_feature (1027)..(1029): n is a, c, g, or t
  misc_feature (1031)..(1034): n is a, c, g, or t
  misc_feature (1036)..(1036): n is a, c, g, or t
  misc_feature (1038)..(1038): n is a, c, g, or t
  misc_feature (1040)..(1040): n is a, c, g, or t
  misc_feature (1044)..(1044): n is a, c, g, or t
  misc_feature (1047)..(1048): n is a, c, g, or t
  misc_feature (1055)..(1056): n is a, c, g, or t
  misc_feature (1058)..(1058): n is a, c, g, or t
  misc_feature (1061)..(1061): n is a, c, g, or t
  misc_feature (1064)..(1065): n is a, c, g, or t
  misc_feature (1067)..(1068): n is a, c, g, or t
  misc_feature (1071)..(1071): n is a, c, g, or t
  misc_feature (1074)..(1074): n is a, c, g, or t
  misc_feature (1080)..(1080): n is a, c, g, or t
  misc_feature (1082)..(1082): n is a, c, g, or t
  misc_feature (1085)..(1086): n is a, c, g, or t
  misc_feature (1088)..(1088): n is a, c, g, or t
  misc_feature (1090)..(1091): n is a, c, g, or t
  misc_feature (1096)..(1096): n is a, c, g, or t
  misc_feature (1101)..(1101): n is a, c, g, or t
  misc_feature (1103)..(1103): n is a, c, g, or t
  misc_feature (1111)..(1111): n is a, c, g, or t
  misc_feature (1115)..(1115): n is a, c, g, or t
  misc_feature (1118)..(1118): n is a, c, g, or t
  misc_feature (1120)..(1122): n is a, c, g, or t
  misc_feature (1124)..(1125): n is a, c, g, or t
  misc_feature (1128)..(1130): n is a, c, g, or t
  misc_feature (1132)..(1132): n is a, c, g, or t
  misc_feature (1136)..(1136): n is a, c, g, or t
  misc_feature (1139)..(1141): n is a, c, g, or t
  misc_feature (1145)..(1148): n is a, c, g, or t
  misc_feature (1151)..(1152): n is a, c, g, or t
  misc_feature (1156)..(1156): n is a, c, g, or t
  misc_feature (1158)..(1160): n is a, c, g, or t
  misc_feature (1162)..(1162): n is a, c, g, or t
  misc_feature (1164)..(1164): n is a, c, g, or t
  misc_feature (1173)..(1176): n is a, c, g, or t
  misc_feature (1178)..(1178): n is a, c, g, or t
  misc_feature (1182)..(1182): n is a, c, g, or t
  misc_feature (1187)..(1188): n is a, c, g, or t
  misc_feature (1190)..(1191): n is a, c, g, or t
  misc_feature (1196)..(1197): n is a, c, g, or t
  misc_feature (1207)..(1207): n is a, c, g, or t
  misc_feature (1209)..(1209): n is a, c, g, or t
  misc_feature (1211)..(1211): n is a, c, g, or t
  misc_feature (1213)..(1213): n is a, c, g, or t
  misc_feature (1216)..(1217): n is a, c, g, or t
  misc_feature (1222)..(1223): n is a, c, g, or t
  misc_feature (1228)..(1228): n is a, c, g, or t
  misc_feature (1230)..(1230): n is a, c, g, or t
  misc_feature (1233)..(1233): n is a, c, g, or t
  misc_feature (1238)..(1238): n is a, c, g, or t
  misc_feature (1240)..(1240): n is a, c, g, or t
  misc_feature (1242)..(1242): n is a, c, g, or t
  misc_feature (1244)..(1244): n is a, c, g, or t
  misc_feature (1248)..(1248): n is a, c, g, or t
  misc_feature (1250)..(1250): n is a, c, g, or t
  misc_feature (1259)..(1260): n is a, c, g, or t
  misc_feature (1272)..(1273): n is a, c, g, or t
  misc_feature (1277)..(1277): n is a, c, g, or t
  misc_feature (1279)..(1279): n is a, c, g, or t
  misc_feature (1285)..(1285): n is a, c, g, or t
  misc_feature (1287)..(1287): n is a, c, g, or t
  misc_feature (1291)..(1292): n is a, c, g, or t
  misc_feature (1299)..(1299): n is a, c, g, or t
  misc_feature (1303)..(1304): n is a, c, g, or t
  misc_feature (1306)..(1307): n is a, c, g, or t
  misc_feature (1309)..(1310): n is a, c, g, or t
  misc_feature (1314)..(1314): n is a, c, g, or t
  misc_feature (1317)..(1317): n is a, c, g, or t
  misc_feature (1323)..(1325): n is a, c, g, or t
  misc_feature (1331)..(1331): n is a, c, g, or t
  misc_feature (1334)..(1334): n is a, c, g, or t
  misc_feature (1341)..(1341): n is a, c, g, or t
  misc_feature (1346)..(1346): n is a, c, g, or t
  misc_feature (1348)..(1349): n is a, c, g, or t
  misc_feature (1351)..(1353): n is a, c, g, or t
  misc_feature (1357)..(1357): n is a, c, g, or t
  misc_feature (1363)..(1363): n is a, c, g, or t
  misc_feature (1378)..(1380): n is a, c, g, or t
  misc_feature (1383)..(1384): n is a, c, g, or t
  misc_feature (1388)..(1388): n is a, c, g, or t
  misc_feature (1390)..(1390): n is a, c, g, or t
  misc_feature (1397)..(1398): n is a, c, g, or t
  misc_feature (1400)..(1400): n is a, c, g, or t
  misc_feature (1404)..(1404): n is a, c, g, or t
  misc_feature (1411)..(1411): n is a, c, g, or t
  misc_feature (1415)..(1415): n is a, c, g, or t
  misc_feature (1417)..(1417): n is a, c, g, or t
  misc_feature (1419)..(1423): n is a, c, g, or t
  misc_feature (1425)..(1426): n is a, c, g, or t
  misc_feature (1430)..(1430): n is a, c, g, or t
  misc_feature (1440)..(1440): n is a, c, g, or t
  misc_feature (1443)..(1445): n is a, c, g, or t
  misc_feature (1447)..(1448): n is a, c, g, or t
  misc_feature (1450)..(1450): n is a, c, g, or t
  misc_feature (1452)..(1452): n is a, c, g, or t
  misc_feature (1457)..(1457): n is a, c, g, or t
  misc_feature (1461)..(1461): n is a, c, g, or t
  misc_feature (1464)..(1464): n is a, c, g, or t
  misc_feature (1469)..(1469): n is a, c, g, or t
  misc_feature (1473)..(1473): n is a, c, g, or t
  misc_feature (1477)..(1477): n is a, c, g, or t
  misc_feature (1479)..(1479): n is a, c, g, or t
  misc_feature (1486)..(1486): n is a, c, g, or t
  misc_feature (1490)..(1490): n is a, c, g, or t
  misc_feature (1493)..(1493): n is a, c, g, or t
  misc_feature (1495)..(1495): n is a, c, g, or t
  misc_feature (1502)..(1502): n is a, c, g, or t
  misc_feature (1505)..(1505): n is a, c, g, or t
  misc_feature (1511)..(1512): n is a, c, g, or t
  misc_feature (1517)..(1517): n is a, c, g, or t
  misc_feature (1519)..(1519): n is a, c, g, or t
  misc_feature (1527)..(1527): n is a, c, g, or t
  misc_feature (1530)..(1530): n is a, c, g, or t
  misc_feature (1533)..(1533): n is a, c, g, or t
  misc_feature (1535)..(1535): n is a, c, g, or t
  misc_feature (1538)..(1538): n is a, c, g, or t
  misc_feature (1540)..(1544): n is a, c, g, or t
  misc_feature (1549)..(1549): n is a, c, g, or t
  misc_feature (1551)..(1551): n is a, c, g, or t
  misc_feature (1556)..(1558): n is a, c, g, or t
  misc_feature (1560)..(1560): n is a, c, g, or t
  misc_feature (1564)..(1565): n is a, c, g, or t
  misc_feature (1570)..(1572): n is a, c, g, or t
  misc_feature (1585)..(1586): n is a, c, g, or t
  misc_feature (1588)..(1590): n is a, c, g, or t
  misc_feature (1593)..(1594): n is a, c, g, or t
  misc_feature (1598)..(1601): n is a, c, g, or t
  misc_feature (1607)..(1607): n is a, c, g, or t
  misc_feature (1620)..(1620): n is a, c, g, or t
  misc_feature (1623)..(1624): n is a, c, g, or t
  misc_feature (1627)..(1628): n is a, c, g, or t
  misc_feature (1631)..(1631): n is a, c, g, or t
atnagntaagagagattactatgagaggatcgcatccccctcaccatcacggnattctattttagggtgacactatagtaatcggtccanccnngcngtccggtccntntnggnacggttntattcccctccanagncggggcaagggacggggggggcccngaggagggggcctcgggcgccncgcctgcgcctgctgcccccgccccggcggcnatgcgctcctggccntnacccccgctgggggcngggnccgggntcnatgcncngantccccacctgncncgntcgacnngntngctcnacntangtgnngnntggctgnnnncnacncctannctctnagngcaagccnngtgntannctncaatntcanannnanatgtnatgntgcnnttctaagnntnnnnntangcttcatntcacntnacattaaantttnaanagaatntagctatangcnatatnatncancacntctcnaacagagcgtctcnnaaaatcntngntnnttncntgnnaccccntnnattaacccnnntgancnttntctanaacacaagnatanacatctncnttcnnatttnnnnncangnatatnacnnaccnnncttctnatgtnaannncatntnancanatanactnannncnnnntaacctttatatcgtnnttgncaacaagtaaanctgnaacnaaatatntgggnnnanannncnctaatctcantcacncgntncntcatnnatcantaantncctcnttcnatcactnattnccnatngcannncnattntntcatganntnaantattncntnntncnnacancnnannaancannanaanacnttnatannntntncnaataatnccnnacnancncntntnnaaaaancatnaatcctanngatctcactcaanncatactcatnnaatctatactctnaaaagcncnnaanannctntaacnatttancnnntnancanatcccctnnctatcancctnnnccnntatncnctncatnnnannnntnananactnaannaccctanncntanttnnannctnatnataaananaannananntaaanatttncncaatcttnacanttnannncnngtnnnanaaanaannnatannnnacnntaanannntnangatataaannnncnacantgatnntnnctgtnntatttataanantntnaannaattnntaatntngtnatacnanantnattntnccgttcagnntatatctcaaannaacnancattanantttnnatccttntacnnanncnntcantancacatnnnttctanatnccttatnatctnannannncagntcatanatatctcgtataatnnnctnnattnanctaaacnntnacanatcaacntatntntnnnnnanncatnatccacttanatnnntnngntnaaatnatanaanaaatntaanactnantcataantagnaantntaaatantancaaatnnctacntnatctactntcnatncntancnnnnnctcanancttannnanactnntgtgnnncatcattgtaaannannntcnnattnnnnacactntctctactattanacnnacnnatnaatag

SEQ ID NO: 884 - DNA, 1412 bp, Homo Sapiens
  misc_feature (1)..(1): n is a, c, g, or t
  misc_feature (3)..(3): n is a, c, g, or t
  misc_feature (5)..(5): n is a, c, g, or t
  misc_feature (11)..(11): n is a, c, g, or t
  misc_feature (13)..(13): n is a, c, g, or t
  misc_feature (23)..(23): n is a, c, g, or t
  misc_feature (352)..(352): n is a, c, g, or t
  misc_feature (826)..(826): n is a, c, g, or t
  misc_feature (840)..(840): n is a, c, g, or t
  misc_feature (916)..(916): n is a, c, g, or t
  misc_feature (920)..(921): n is a, c, g, or t
  misc_feature (923)..(923): n is a, c, g, or t
  misc_feature (940)..(940): n is a, c, g, or t
  misc_feature (955)..(955): n is a, c, g, or t
  misc_feature (970)..(970): n is a, c, g, or t
  misc_feature (974)..(974): n is a, c, g, or t
  misc_feature (981)..(981): n is a, c, g, or t
  misc_feature (987)..(987): n is a, c, g, or t
  misc_feature (990)..(990): n is a, c, g, or t
  misc_feature (996)..(996): n is a, c, g, or t
  misc_feature (999)..(999): n is a, c, g, or t
  misc_feature (1017)..(1017): n is a, c, g, or t
  misc_feature (1028)..(1029): n is a, c, g, or t
  misc_feature (1031)..(1032): n is a, c, g, or t
  misc_feature (1035)..(1035): n is a, c, g, or t
  misc_feature (1041)..(1041): n is a, c, g, or t
  misc_feature (1051)..(1051): n is a, c, g, or t
  misc_feature (1057)..(1057): n is a, c, g, or t
  misc_feature (1064)..(1064): n is a, c, g, or t
  misc_feature (1073)..(1073): n is a, c, g, or t
  misc_feature (1082)..(1082): n is a, c, g, or t
  misc_feature (1089)..(1089): n is a, c, g, or t
  misc_feature (1094)..(1094): n is a, c, g, or t
  misc_feature (1098)..(1098): n is a, c, g, or t
  misc_feature (1103)..(1103): n is a, c, g, or t
  misc_feature (1111)..(1111): n is a, c, g, or t
  misc_feature (1122)..(1122): n is a, c, g, or t
  misc_feature (1125)..(1125): n is a, c, g, or t
  misc_feature (1141)..(1141): n is a, c, g, or t
  misc_feature (1147)..(1147): n is a, c, g, or t
  misc_feature (1155)..(1155): n is a, c, g, or t
  misc_feature (1161)..(1161): n is a, c, g, or t
  misc_feature (1163)..(1163): n is a, c, g, or t
  misc_feature (1168)..(1168): n is a, c, g, or t
  misc_feature (1170)..(1170): n is a, c, g, or t
  misc_feature (1173)..(1173): n is a, c, g, or t
  misc_feature (1175)..(1178): n is a, c, g, or t
  misc_feature (1181)..(1181): n is a, c, g, or t
  misc_feature (1187)..(1187): n is a, c, g, or t
  misc_feature (1190)..(1194): n is a, c, g, or t
  misc_feature (1197)..(1197): n is a, c, g, or t
  misc_feature (1204)..(1204): n is a, c, g, or t
  misc_feature (1206)..(1207): n is a, c, g, or t
  misc_feature (1215)..(1215): n is a, c, g, or t
  misc_feature (1217)..(1217): n is a, c, g, or t
  misc_feature (1219)..(1219): n is a, c, g, or t
  misc_feature (1223)..(1226): n is a, c, g, or t
  misc_feature (1229)..(1230): n is a, c, g, or t
  misc_feature (1238)..(1238): n is a, c, g, or t
  misc_feature (1242)..(1244): n is a, c, g, or t
  misc_feature (1246)..(1248): n is a, c, g, or t
  misc_feature (1255)..(1255): n is a, c, g, or t
  misc_feature (1264)..(1265): n is a, c, g, or t
  misc_feature (1267)..(1268): n is a, c, g, or t
  misc_feature (1270)..(1271): n is a, c, g, or t
  misc_feature (1276)..(1277): n is a, c, g, or t
  misc_feature (1280)..(1281): n is a, c, g, or t
  misc_feature (1285)..(1285): n is a, c, g, or t
  misc_feature (1289)..(1289): n is a, c, g, or t
  misc_feature (1298)..(1300): n is a, c, g, or t
  misc_feature (1303)..(1303): n is a, c, g, or t
  misc_feature (1308)..(1308): n is a, c, g, or t
  misc_feature (1311)..(1313): n is a, c, g, or t
  misc_feature (1316)..(1316): n is a, c, g, or t
  misc_feature (1323)..(1323): n is a, c, g, or t
  misc_feature (1327)..(1327): n is a, c, g, or t
  misc_feature (1329)..(1330): n is a, c, g, or t
  misc_feature (1333)..(1334): n is a, c, g, or t
  misc_feature (1337)..(1337): n is a, c, g, or t
  misc_feature (1340)..(1340): n is a, c, g, or t
  misc_feature (1344)..(1346): n is a, c, g, or t
  misc_feature (1348)..(1348): n is a, c, g, or t
  misc_feature (1350)..(1351): n is a, c, g, or t
  misc_feature (1355)..(1357): n is a, c, g, or t
  misc_feature (1362)..(1362): n is a, c, g, or t
  misc_feature (1370)..(1377): n is a, c, g, or t
  misc_feature (1381)..(1384): n is a, c, g, or t
  misc_feature (1386)..(1389): n is a, c, g, or t
  misc_feature (1392)..(1393): n is a, c, g, or t
  misc_feature (1395)..(1398): n is a, c, g, or t
  misc_feature (1400)..(1402): n is a, c, g, or t
  misc_feature (1409)..(1409): n is a, c, g, or t
nantnagagananttactgtganaggatcgcatcaccatcaccatcacggatcctatttaggtgacactatagaatcgtcgacccacgcgtccgcccacgcgtccgcctgtactaccaggcctgcgtcttcgacctcctcaccacgggcgacgtgaacttcacactggccgcctactacgcgttggaggatgtcaagatgctccactccaacaaagacaaactgcacctgtatgagaggactcgggacctgccaggcagggcggctgcggggctgcccctggccccccggcccctcctgggcgccctggtcccgctcctggccctgctccctgtgttctgctagacgcgtanatgtggagggaggcgcgggctccgtcctctcggcttccccatgtgtgggctgggaccgcccacggggtgcagatctcctggcgtgtccaccatggccccgcagaacgccagggaccgcctgctgccaagggctcaggcatggacccctccccttctagtgcacgtgacaaggttgtggtgactggtgccgtgatgtttgacagtagagctgtgtgagagggagagcagctcccctcgccccgcccctgcagtgtgaatgtgtgaaacatcccctcaggctgaagccccccacccccaccagagacacactgggaaccgtcagagtcagctccttccccctcgcaatgcactgaaaggcccggccgactgctgctcgccgatccgtggggccccctgtgcccgccacacgcacgcacacactcttacacgagagcacactcgatccccctaggccagcggggacaccccagccanacagggaggcatcnttgggggcttggccccaggcagggcaaccccggggcgctgcttggcaccttaacaaaaatgctggaacctttttgnccannangtcgtgcccgccttggngccttctggcctggnggcctccctggccangttnacctggntgctgnggnaaaaantgnaggtcccggtttttaggnacctggttcanntnnccngttttntgggctgggnccctgncccttcnaccttgggnttaaaaaancaaaatntttgntttnaaatntttaaaanaaaaaaaaaanccntgaattcggtcccccncccccnggaaaaanaaaaantnttggnanggntnnnnggnccccanggnnnnnaanaaaaccnanngaaagggncnantggnnnnccnnaatttttntttnnncnnnaaaaccnaaaaccccnncnngnntttcnnttnnaaantggnaaaaaaaannnttnaaaanttnnnttnaaaaccngggngnnttnnccnaantttnnntnanngggnnnaaaanaaaaaatnnnnnnnncccnnnntnnnnggnntnnnngnnnaaaaacnttg

SEQ ID NO: 885 - DNA, 1328 bp, Homo Sapiens
  misc_feature (808)..(808): n is a, c, g, or t
  misc_feature (860)..(860): n is a, c, g, or t
  misc_feature (902)..(902): n is a, c, g, or t
  misc_feature (931)..(931): n is a, c, g, or t
  misc_feature (946)..(946): n is a, c, g, or t
  misc_feature (949)..(949): n is a, c, g, or t
  misc_feature (954)..(954): n is a, c, g, or t
  misc_feature (961)..(961): n is a, c, g, or t
  misc_feature (964)..(964): n is a, c, g, or t
  misc_feature (966)..(966): n is a, c, g, or t
  misc_feature (975)..(975): n is a, c, g, or t
  misc_feature (979)..(979): n is a, c, g, or t
  misc_feature (981)..(981): n is a, c, g, or t
  misc_feature (983)..(983): n is a, c, g, or t
  misc_feature (989)..(989): n is a, c, g, or t
  misc_feature (1002)..(1003): n is a, c, g, or t
  misc_feature (1030)..(1030): n is a, c, g, or t
  misc_feature (1032)..(1032): n is a, c, g, or t
  misc_feature (1047)..(1047): n is a, c, g, or t
  misc_feature (1052)..(1052): n is a, c, g, or t
  misc_feature (1055)..(1055): n is a, c, g, or t
  misc_feature (1060)..(1060): n is a, c, g, or t
  misc_feature (1062)..(1062): n is a, c, g, or t
  misc_feature (1068)..(1068): n is a, c, g, or t
  misc_feature (1071)..(1071): n is a, c, g, or t
  misc_feature (1073)..(1073): n is a, c, g, or t
  misc_feature (1089)..(1089): n is a, c, g, or t
  misc_feature (1098)..(1098): n is a, c, g, or t
  misc_feature (1100)..(1100): n is a, c, g, or t
  misc_feature (1104)..(1105): n is a, c, g, or t
  misc_feature (1111)..(1112): n is a, c, g, or t
  misc_feature (1123)..(1124): n is a, c, g, or t
  misc_feature (1126)..(1126): n is a, c, g, or t
  misc_feature (1129)..(1129): n is a, c, g, or t
  misc_feature (1132)..(1135): n is a, c, g, or t
  misc_feature (1141)..(1141): n is a, c, g, or t
  misc_feature (1145)..(1147): n is a, c, g, or t
  misc_feature (1151)..(1151): n is a, c, g, or t
  misc_feature (1157)..(1157): n is a, c, g, or t
  misc_feature (1161)..(1161): n is a, c, g, or t
  misc_feature (1163)..(1163): n is a, c, g, or t
  misc_feature (1166)..(1166): n is a, c, g, or t
  misc_feature (1168)..(1168): n is a, c, g, or t
  misc_feature (1171)..(1171): n is a, c, g, or t
  misc_feature (1175)..(1180): n is a, c, g, or t
  misc_feature (1183)..(1183): n is a, c, g, or t
  misc_feature (1186)..(1186): n is a, c, g, or t
  misc_feature (1191)..(1191): n is a, c, g, or t
  misc_feature (1193)..(1194): n is a, c, g, or t
  misc_feature (1196)..(1199): n is a, c, g, or t
  misc_feature (1202)..(1203): n is a, c, g, or t
  misc_feature (1206)..(1206): n is a, c, g, or t
  misc_feature (1212)..(1212): n is a, c, g, or t
  misc_feature (1214)..(1217): n is a, c, g, or t
  misc_feature (1221)..(1221): n is a, c, g, or t
  misc_feature (1225)..(1226): n is a, c, g, or t
  misc_feature (1231)..(1231): n is a, c, g, or t
  misc_feature (1237)..(1243): n is a, c, g, or t
  misc_feature (1250)..(1251): n is a, c, g, or t
  misc_feature (1253)..(1254): n is a, c, g, or t
  misc_feature (1256)..(1264): n is a, c, g, or t
  misc_feature (1266)..(1269): n is a, c, g, or t
  misc_feature (1271)..(1273): n is a, c, g, or t
  misc_feature (1275)..(1289): n is a, c, g, or t
  misc_feature (1291)..(1291): n is a, c, g, or t
  misc_feature (1296)..(1298): n is a, c, g, or t
  misc_feature (1300)..(1300): n is a, c, g, or t
  misc_feature (1303)..(1311): n is a, c, g, or t
  misc_feature (1314)..(1316): n is a, c, g, or t
  misc_feature (1319)..(1328): n is a, c, g, or t
agaaattactatgagaggatcgcatcaccatcaccatcacggatcctatttaggtgacactatagaatcgtcgacccacgcgtccggggagcagagcagtgcccggatcaccatctccgagggctcctgccctgaacgcatcaccaccatcaccgggtctacagcagctgtcttccatgcagtctccatgattgctttcaaactggatgaggacctttgtgctgctcctgcaaatggtggaaatgtctccaggcctccagtgaccctgcgccttgtcatccctgccagtcagtgtggctcactgattgggaaggctggcaccaagatcaaggagatccgagagactacgggtgcccaggtacaggtggcaggggacctgctccccaactccacagagcgagctgttacggtatctggggtgcctgatgccatcatcctgtgtgtgcgccagatctgcgctgttatcctggagtccccacccaaaggagccactatcccctaccatccgagcctctccctagcgtggtgccaggactggatcccggcacacagaccagctcacaggagttcttggttcccaacgatttgattggctgtgtgatcgggcgccagggcagcaagatcagcgagatccggcagatgtcaggggcacatatcaagatcgggaaccaagcagagggcgctggggagcggcatgtcaccatcactggctctccggtctccatcgccctggcccagtacctcatcactgcctgtctagagacggccaagtctacctctggggggacgcccagctcggcccccgcanacctgcctgcccccttctcgccacccctgacggccctgcccacagctccccntggcctgctgggcacaccctatgccatctccctctccaattnatcggcctcagccatgccttcttggcttnacacctgcttcccanggncgccnccggctnggngnctaactgcnaaangnancactanggaacaaaaaggnnaacggcaaaattccccctatgagccantnagtaagaggggcagnagacncanagggntncttgcnccnanccccaagaaatccccngggtccaancnctannccaaannggaagcccccnncngcnccnnnnggaatntttnnnaaanggggantttngncangnttnaatnnnnnnccnggngggcnanncnnnnttnnttnaaaggnannnnaaanccannccccngggggnnnnnnnccccccnnanntnnnnnnnnntnnnnannnannnnnnnnnnnnnnntnccccnnnanttnnnnnnnnnttnnnaannnnnnnnnn

SEQ ID NO: 886 - DNA, 1312 bp, Homo Sapiens
  misc_feature (11)..(11): n is a, c, g, or t
  misc_feature (888)..(888): n is a, c, g, or t
  misc_feature (935)..(935): n is a, c, g, or t
  misc_feature (974)..(974): n is a, c, g, or t
  misc_feature (983)..(983): n is a, c, g, or t
  misc_feature (989)..(989): n is a, c, g, or t
  misc_feature (994)..(994): n is a, c, g, or t
  misc_feature (999)..(999): n is a, c, g, or t
  misc_feature (1011)..(1011): n is a, c, g, or t
  misc_feature (1020)..(1020): n is a, c, g, or t
  misc_feature (1025)..(1025): n is a, c, g, or t
  misc_feature (1053)..(1054): n is a, c, g, or t
  misc_feature (1066)..(1066): n is a, c, g, or t
  misc_feature (1069)..(1069): n is a, c, g, or t
  misc_feature (1079)..(1079): n is a, c, g, or t
  misc_feature (1088)..(1088): n is a, c, g, or t
  misc_feature (1094)..(1094): n is a, c, g, or t
  misc_feature (1098)..(1098): n is a, c, g, or t
  misc_feature (1100)..(1100): n is a, c, g, or t
  misc_feature (1102)..(1102): n is a, c, g, or t
  misc_feature (1106)..(1106): n is a, c, g, or t
  misc_feature (1123)..(1123): n is a, c, g, or t
  misc_feature (1126)..(1126): n is a, c, g, or t
  misc_feature (1128)..(1129): n is a, c, g, or t
  misc_feature (1132)..(1133): n is a, c, g, or t
  misc_feature (1142)..(1142): n is a, c, g, or t
  misc_feature (1149)..(1149): n is a, c, g, or t
  misc_feature (1154)..(1154): n is a, c, g, or t
  misc_feature (1156)..(1157): n is a, c, g, or t
  misc_feature (1161)..(1161): n is a, c, g, or t
  misc_feature (1163)..(1163): n is a, c, g, or t
  misc_feature (1167)..(1168): n is a, c, g, or t
  misc_feature (1171)..(1171): n is a, c, g, or t
  misc_feature (1173)..(1173): n is a, c, g, or t
  misc_feature (1187)..(1187): n is a, c, g, or t
  misc_feature (1200)..(1201): n is a, c, g, or t
  misc_feature (1204)..(1204): n is a, c, g, or t
  misc_feature (1212)..(1213): n is a, c, g, or t
  misc_feature (1224)..(1224): n is a, c, g, or t
  misc_feature (1227)..(1230): n is a, c, g, or t
  misc_feature (1240)..(1244): n is a, c, g, or t
  misc_feature (1248)..(1248): n is a, c, g, or t
  misc_feature (1250)..(1251): n is a, c, g, or t
  misc_feature (1253)..(1253): n is a, c, g, or t
  misc_feature (1255)..(1255): n is a, c, g, or t
  misc_feature (1262)..(1263): n is a, c, g, or t
  misc_feature (1265)..(1266): n is a, c, g, or t
  misc_feature (1268)..(1268): n is a, c, g, or t
  misc_feature (1273)..(1274): n is a, c, g, or t
  misc_feature (1278)..(1278): n is a, c, g, or t
  misc_feature (1283)..(1283): n is a, c, g, or t
  misc_feature (1287)..(1287): n is a, c, g, or t
  misc_feature (1294)..(1295): n is a, c, g, or t
  misc_feature (1298)..(1298): n is a, c, g, or t
  misc_feature (1304)..(1304): n is a, c, g, or t
gagaaattacnatgagaggatcgcatcaccatcaccatcacggatcctatttaggtgacactatagaatcgtcgacccacgcgtccgcccacgcgtccgcccacgcgtccgcccacgcgtccgatccaaaaaagaaactgtttgagaccagttcgagaaattccgtttgctctattcttcctagctctaagatggttgcaggcttgaccttcaagacagcataaagtgagtccttttgtccctcttcaggttgcacctgtctaactatgacagggatcatagcaggttgcttaatgatacagcaggatcctggcttccagaatccctggacctggggcatccccaactggtccaaccgtccgggtgagtttagtgattctggtttgcccttccctagttagagaaaaactgctctgacatgttcatatttatttatttgtatttccttggtctgggtgagtttcttcacccagtctttgagctaaagattaggtcgaaggtactggggctggccccagaagcctgcagtttttattattaccagcagagggagctacagggagcagtccggtgccttcctattgtttactttttaaacttttgagaagtagcaatggactcgtgagagtgggtatacagctgtgtgggctttgtcctagactgaggcttacagacaggaagggtaagagagacctaagccagctcctagacccttgcctgaggaaatcagtccaccagtgtagagggcctcccttcactccagcatggaccattctattgccagattcttctggtcacagcatgggccttactggatactcaggattgggctttaagcagacctctgggtgtgacacagcctctttcagcccccagcccaaacagcanaaataggcataatttctgctgtgacaccccctacccacaaattgganagtatatctggctatactctataccaagcctctttctanaattttccnacaggntttgntttgntttttggcttanctcaaaacnatggngagcgttctgctttgttttgttggaaanngggtctctgtcnccnagcctggganggcaggggngaatcnaagntnantggngcctcaacctcccaggnccnannaannccccccaanggggganctttnanngggnanaaannggntnccccccccaaaaancgggaatgggggnnaangtttccannggggaaaaaanccnnnnctttgttttnnnnngggncnngngncccccanngnngnagggnnaaanccccntttntcccccnnaangggggnaaaaaaaa

SEQ ID NO: 887 - DNA, 1442 bp, Homo Sapiens
  misc_feature (1)..(1): n is a, c, g, or t
  misc_feature (4)..(6): n is a, c, g, or t
  misc_feature (10)..(10): n is a, c, g, or t
  misc_feature (13)..(17): n is a, c, g, or t
  misc_feature (21)..(21): n is a, c, g, or t
  misc_feature (25)..(26): n is a, c, g, or t
  misc_feature (28)..(28): n is a, c, g, or t
  misc_feature (31)..(31): n is a, c, g, or t
  misc_feature (34)..(34): n is a, c, g, or t
  misc_feature (36)..(36): n is a, c, g, or t
  misc_feature (574)..(574): n is a, c, g, or t
  misc_feature (680)..(680): n is a, c, g, or t
  misc_feature (682)..(682): n is a, c, g, or t
  misc_feature (685)..(685): n is a, c, g, or t
  misc_feature (695)..(695): n is a, c, g, or t
  misc_feature (705)..(705): n is a, c, g, or t
  misc_feature (745)..(745): n is a, c, g, or t
  misc_feature (753)..(753): n is a, c, g, or t
  misc_feature (760)..(760): n is a, c, g, or t
  misc_feature (777)..(777): n is a, c, g, or t
  misc_feature (806)..(806): n is a, c, g, or t
  misc_feature (826)..(826): n is a, c, g, or t
  misc_feature (828)..(828): n is a, c, g, or t
  misc_feature (852)..(852): n is a, c, g, or t
  misc_feature (858)..(858): n is a, c, g, or t
  misc_feature (874)..(875): n is a, c, g, or t
  misc_feature (884)..(884): n is a, c, g, or t
  misc_feature (887)..(888): n is a, c, g, or t
  misc_feature (893)..(893): n is a, c, g, or t
  misc_feature (896)..(896): n is a, c, g, or t
  misc_feature (898)..(898): n is a, c, g, or t
  misc_feature (908)..(909): n is a, c, g, or t
  misc_feature (916)..(916): n is a, c, g, or t
  misc_feature (922)..(922): n is a, c, g, or t
  misc_feature (926)..(926): n is a, c, g, or t
  misc_feature (935)..(936): n is a, c, g, or t
  misc_feature (942)..(942): n is a, c, g, or t
  misc_feature (953)..(953): n is a, c, g, or t
  misc_feature (959)..(959): n is a, c, g, or t
  misc_feature (964)..(964): n is a, c, g, or t
  misc_feature (967)..(967): n is a, c, g, or t
  misc_feature (969)..(970): n is a, c, g, or t
  misc_feature (973)..(974): n is a, c, g, or t
  misc_feature (981)..(981): n is a, c, g, or t
  misc_feature (984)..(985): n is a, c, g, or t
  misc_feature (989)..(989): n is a, c, g, or t
  misc_feature (994)..(995): n is a, c, g, or t
  misc_feature (997)..(997): n is a, c, g, or t
  misc_feature (999)..(999): n is a, c, g, or t
  misc_feature (1001)..(1002): n is a, c, g, or t
  misc_feature (1004)..(1005): n is a, c, g, or t
  misc_feature (1008)..(1012): n is a, c, g, or t
  misc_feature (1016)..(1017): n is a, c, g, or t
  misc_feature (1020)..(1020): n is a, c, g, or t
  misc_feature (1030)..(1030): n is a, c, g, or t
  misc_feature (1032)..(1032): n is a, c, g, or t
  misc_feature (1035)..(1035): n is a, c, g, or t
  misc_feature (1043)..(1043): n is a, c, g, or t
  misc_feature (1047)..(1047): n is a, c, g, or t
  misc_feature (1051)..(1051): n is a, c, g, or t
  misc_feature (1053)..(1055): n is a, c, g, or t
  misc_feature (1058)..(1059): n is a, c, g, or t
  misc_feature (1065)..(1066): n is a, c, g, or t
  misc_feature (1073)..(1073): n is a, c, g, or t
  misc_feature (1083)..(1083): n is a, c, g, or t
  misc_feature (1087)..(1087): n is a, c, g, or t
  misc_feature (1089)..(1089): n is a, c, g, or t
  misc_feature (1093)..(1094): n is a, c, g, or t
  misc_feature (1097)..(1099): n is a, c, g, or t
  misc_feature (1103)..(1103): n is a, c, g, or t
  misc_feature (1109)..(1110): n is a, c, g, or t
  misc_feature (1112)..(1112): n is a, c, g, or t
  misc_feature (1115)..(1116): n is a, c, g, or t
  misc_feature (1119)..(1121): n is a, c, g, or t
  misc_feature (1126)..(1126): n is a, c, g, or t
  misc_feature (1130)..(1135): n is a, c, g, or t
  misc_feature (1140)..(1142): n is a, c, g, or t
  misc_feature (1144)..(1145): n is a, c, g, or t
  misc_feature (1152)..(1152): n is a, c, g, or t
  misc_feature (1155)..(1155): n is a, c, g, or t
  misc_feature (1159)..(1163): n is a, c, g, or t
  misc_feature (1165)..(1165): n is a, c, g, or t
  misc_feature (1168)..(1168): n is a, c, g, or t
  misc_feature (1173)..(1174): n is a, c, g, or t
  misc_feature (1176)..(1176): n is a, c, g, or t
  misc_feature (1180)..(1180): n is a, c, g, or t
  misc_feature (1182)..(1188): n is a, c, g, or t
  misc_feature (1195)..(1200): n is a, c, g, or t
  misc_feature (1202)..(1206): n is a, c, g, or t
  misc_feature (1209)..(1212): n is a, c, g, or t
  misc_feature (1214)..(1215): n is a, c, g, or t
  misc_feature (1217)..(1223): n is a, c, g, or t
  misc_feature (1226)..(1230): n is a, c, g, or t
  misc_feature (1232)..(1233): n is a, c, g, or t
  misc_feature (1237)..(1239): n is a, c, g, or t
  misc_feature (1243)..(1244): n is a, c, g, or t
  misc_feature (1247)..(1247): n is a, c, g, or t
  misc_feature (1251)..(1251): n is a, c, g, or t
  misc_feature (1253)..(1260): n is a, c, g, or t
  misc_feature (1264)..(1264): n is a, c, g, or t
  misc_feature (1268)..(1270): n is a, c, g, or t
  misc_feature (1272)..(1273): n is a, c, g, or t
  misc_feature (1277)..(1283): n is a, c, g, or t
  misc_feature (1285)..(1290): n is a, c, g, or t
  misc_feature (1294)..(1297): n is a, c, g, or t
  misc_feature (1299)..(1308): n is a, c, g, or t
  misc_feature (1310)..(1310): n is a, c, g, or t
  misc_feature (1312)..(1321): n is a, c, g, or t
  misc_feature (1323)..(1325): n is a, c, g, or t
  misc_feature (1327)..(1328): n is a, c, g, or t
  misc_feature (1330)..(1359): n is a, c, g, or t
  misc_feature (1363)..(1379): n is a, c, g, or t
  misc_feature (1381)..(1394): n is a, c, g, or t
  misc_feature (1396)..(1396): n is a, c, g, or t
  misc_feature (1398)..(1398): n is a, c, g, or t
  misc_feature (1400)..(1409): n is a, c, g, or t
  misc_feature (1412)..(1420): n is a, c, g, or t
  misc_feature (1424)..(1424): n is a, c, g, or t
  misc_feature (1426)..(1426): n is a, c, g, or t
  misc_feature (1430)..(1431): n is a, c, g, or t
  misc_feature (1433)..(1433): n is a, c, g, or t
  misc_feature (1435)..(1436): n is a, c, g, or t
  misc_feature (1439)..(1439): n is a, c, g, or t
  misc_feature (1441)..(1442): n is a, c, g, or t
ncgnnnaccnttnnnnncggntttnncntcnccntnatggatcctatttaggtgacactatagaatcgtcgacccacgcgtccgcggacgcgtgggttgcagtggagcccgcagagaacgtgagcgaagccctccgagctgtgcccagccccacgacgggagaggagggctctgtgcacagcagggaggcaaaagagagttctgcagcccaagctggctctcatgccacgcaccctggcacctcggttcttgagggaggagctgcaggatccatgtctcccagcagagtggaagccaatgtccccatggttcagcctgatgtctcaccagcccccaagcaggaggagccagccgagaacagtgcggatactgggggcgatggggagagctgcctatctcaacaggacggagcagctggggtgccggagaccaacgcagccggttcatcctcagaggcctgtgacttcctcaaggaagacgggaatgatgaggtaatgacccccagtcgacccaggaccacagaagacctttttgcagctattcacagatccaaaaggaaagtcctcggccgtanagattcagatgatgaccactcccgaaaccattctccctccccgcccgtgacacccaccggcgctgccccaagcctggcctctccaaagcaagtggggtcgattcananaancatccgaaanagcagcaccngcagtgacaacttcaaagctctgctgctgaaaaagggcantcgttcanacaccancgcccgcatgtctgcancaaaaatgctcaagaacacagaaccctanattccaaaagtcgaggtcananccttccccaaatgccccccgaaancccttnaagctgcttccccaannaaaaaacanaanngggcntgnangaatggggcnnaaaaaanaaaggntttnatgccttcnnaatctnttcttttttcnggcccnagtanggncnncannccaaacnccnntttntgccnncntnannannttnnnnntttnnaanccgattccanantancccctttnaccntttntnnnagnnaaaagnnaaacccntgaacttttntaananaatnnccnnngggntttggnncnttnnaannnttttncctnnnnnnatttnnnannaataatnaanaaannnnncnttnttttnngnaagngnnnnnnntttcttnnnnnncnnnnnccnnnnanntnnnnnnnaannnnntnnaaannnaaannctncccntnnnnnnnntttntttnnnannattnnnnnnnannnnnncctnnnntnnnnnnnnnnanannnnnnnnnntnnnanntnnnnnnnnnnnnnnnnnnnnnnnnnnnnnntttnnnnnnnnnnnnnnnnntnnnnnnnnnnnnnntntnannnnnnnnnnttnnnnnnnnntttntntttnntntnnaantnn

SEQ ID NO: 888 - DNA, 1200 bp, Homo Sapiens
  misc_feature (1)..(1): n is a, c, g, or t
  misc_feature (3)..(3): n is a, c, g, or t
  misc_feature (797)..(797): n is a, c, g, or t
  misc_feature (822)..(822): n is a, c, g, or t
  misc_feature (854)..(854): n is a, c, g, or t
  misc_feature (885)..(885): n is a, c, g, or t
  misc_feature (888)..(888): n is a, c, g, or t
  misc_feature (894)..(894): n is a, c, g, or t
  misc_feature (906)..(906): n is a, c, g, or t
  misc_feature (909)..(909): n is a, c, g, or t
  misc_feature (939)..(939): n is a, c, g, or t
  misc_feature (950)..(950): n is a, c, g, or t
  misc_feature (964)..(964): n is a, c, g, or t
  misc_feature (968)..(968): n is a, c, g, or t
  misc_feature (972)..(972): n is a, c, g, or t
  misc_feature (983)..(983): n is a, c, g, or t
  misc_feature (991)..(991): n is a, c, g, or t
  misc_feature (1007)..(1007): n is a, c, g, or t
  misc_feature (1012)..(1013): n is a, c, g, or t
  misc_feature (1018)..(1018): n is a, c, g, or t
  misc_feature (1024)..(1024): n is a, c, g, or t
  misc_feature (1031)..(1031): n is a, c, g, or t
  misc_feature (1035)..(1035): n is a, c, g, or t
  misc_feature (1038)..(1038): n is a, c, g, or t
  misc_feature (1040)..(1040): n is a, c, g, or t
  misc_feature (1052)..(1052): n is a, c, g, or t
  misc_feature (1059)..(1059): n is a, c, g, or t
  misc_feature (1063)..(1065): n is a, c, g, or t
  misc_feature (1070)..(1071): n is a, c, g, or t
  misc_feature (1081)..(1081): n is a, c, g, or t
  misc_feature (1083)..(1086): n is a, c, g, or t
  misc_feature (1096)..(1097): n is a, c, g, or t
  misc_feature (1108)..(1108): n is a, c, g, or t
  misc_feature (1111)..(1112): n is a, c, g, or t
  misc_feature (1114)..(1114): n is a, c, g, or t
  misc_feature (1120)..(1120): n is a, c, g, or t
  misc_feature (1125)..(1125): n is a, c, g, or t
  misc_feature (1130)..(1132): n is a, c, g, or t
  misc_feature (1138)..(1138): n is a, c, g, or t
  misc_feature (1141)..(1142): n is a, c, g, or t
  misc_feature (1149)..(1150): n is a, c, g, or t
  misc_feature (1153)..(1153): n is a, c, g, or t
  misc_feature (1156)..(1156): n is a, c, g, or t
  misc_feature (1165)..(1165): n is a, c, g, or t
  misc_feature (1181)..(1181): n is a, c, g, or t
  misc_feature (1184)..(1185): n is a, c, g, or t
  misc_feature (1188)..(1188): n is a, c, g, or t
  misc_feature (1196)..(1196): n is a, c, g, or t
nanttagagagaattactatgagaggatcgcatcaccatcaccatcacggatcctatttaggtgacactatagaatcgtcgacccacgcgtccgcccacgcgtccgagcagccttccagcccaaggagttccaaccccccttgctcccagccccgccatgcagcctccagtgccgccctgcccagggccaggtctggaaagctcagcagctagtcggtggaatggggagacagaacccccggccgcccctgctgccctcctcaaggtgcccggagcaggaacagcccccaagcctgtgtcggtggcctgcacccagctggcattttctggccctaagctagcgccccggctcggcccccgcccagtgcctcctccacggcctgagagcactgggactgtgggcccaggccaggcccagcagagactggagcagaccagctcgtccctggcagctgcactgagagccgcagagaagagcattggcaccaaggagcaagagggcacccccagcgcctccaccaagcacattctggatgacatcagcaccatgttcgacgccctggctgaccagctggacgccatgctggactgagccctccagcagtgcccactgtgacctgccgaagtccactgcctttgccccagcacagaagaggcccctgccaccctagggacgggccaagggctggtcaggctgaagtgcccctcctagcagggccccttcccactcagcccgcggctgtgggcaccacagctcttgtggggcagcccaccttaaaacctgactagcgaggganctccgctgcatctcagcaaaagccnctcccagggtttgatcgattgagcaggacagncctgctcctggacagggaaccctggtaaganctnttctcntcagggaagaantanggggtggggctttggggggtgctttttttngtaccccccancccatgttcccaantttntgcnaagggaaatgnctttttgncacccaacattcttgnccaannccttnaaaagnttgaaanaagnttntnttttggcccggnccccctnttcnnnaggtnntaaaaagaanannnnaaataacaannggggggggccnagnnanttctgncccgnctttnnnttattnagnnagggttnnaanggngggaagaanggggttaaaaaatccnaannccnaatttttnattg

SEQ ID NO: 889 - DNA, 1200 bp, Homo Sapiens
  misc_feature (3)..(3): n is a, c, g, or t
  misc_feature (7)..(7): n is a, c, g, or t
  misc_feature (47)..(47): n is a, c, g, or t
  misc_feature (51)..(51): n is a, c, g, or t
  misc_feature (53)..(54): n is a, c, g, or t
  misc_feature (64)..(64): n is a, c, g, or t
  misc_feature (70)..(71): n is a, c, g, or t
  misc_feature (112)..(112): n is a, c, g, or t
  misc_feature (121)..(121): n is a, c, g, or t
  misc_feature (125)..(125): n is a, c, g, or t
  misc_feature (128)..(128): n is a, c, g, or t
  misc_feature (131)..(131): n is a, c, g, or t
  misc_feature (133)..(133): n is a, c, g, or t
  misc_feature (138)..(139): n is a, c, g, or t
  misc_feature (146)..(149): n is a, c, g, or t
  misc_feature (158)..(158): n is a, c, g, or t
  misc_feature (166)..(166): n is a, c, g, or t
  misc_feature (172)..(175): n is a, c, g, or t
  misc_feature (181)..(181): n is a, c, g, or t
  misc_feature (187)..(187): n is a, c, g, or t
  misc_feature (191)..(191): n is a, c, g, or t
  misc_feature (194)..(194): n is a, c, g, or t
  misc_feature (202)..(202): n is a, c, g, or t
  misc_feature (204)..(204): n is a, c, g, or t
  misc_feature (226)..(226): n is a, c, g, or t
  misc_feature (230)..(231): n is a, c, g, or t
  misc_feature (234)..(236): n is a, c, g, or t
  misc_feature (238)..(238): n is a, c, g, or t
  misc_feature (242)..(243): n is a, c, g, or t
  misc_feature (246)..(246): n is a, c, g, or t
  misc_feature (251)..(251): n is a, c, g, or t
  misc_feature (259)..(259): n is a, c, g, or t
  misc_feature (262)..(263): n is a, c, g, or t
  misc_feature (265)..(265): n is a, c, g, or t
  misc_feature (269)..(269): n is a, c, g, or t
  misc_feature (274)..(274): n is a, c, g, or t
  misc_feature (288)..(288): n is a, c, g, or t
  misc_feature (290)..(290): n is a, c, g, or t
  misc_feature (294)..(294): n is a, c, g, or t
  misc_feature (296)..(296): n is a, c, g, or t
  misc_feature (298)..(298): n is a, c, g, or t
  misc_feature (306)..(306): n is a, c, g, or t
  misc_feature (323)..(323): n is a, c, g, or t
  misc_feature (329)..(329): n is a, c, g, or t
  misc_feature (351)..(351): n is a, c, g, or t
  misc_feature (383)..(383): n is a, c, g, or t
  misc_feature (457)..(457): n is a, c, g, or t
  misc_feature (459)..(459): n is a, c, g, or t
  misc_feature (465)..(465): n is a, c, g, or t
  misc_feature (484)..(484): n is a, c, g, or t
  misc_feature (535)..(536): n is a, c, g, or t
  misc_feature (593)..(593): n is a, c, g, or t
  misc_feature (597)..(597): n is a, c, g, or t
  misc_feature (602)..(602): n is a, c, g, or t
  misc_feature (632)..(632): n is a, c, g, or t
  misc_feature (635)..(635): n is a, c, g, or t
  misc_feature (641)..(641): n is a, c, g, or t
  misc_feature (712)..(712): n is a, c, g, or t
  misc_feature (714)..(714): n is a, c, g, or t
  misc_feature (742)..(742): n is a, c, g, or t
  misc_feature (756)..(756): n is a, c, g, or t
  misc_feature (765)..(765): n is a, c, g, or t
  misc_feature (789)..(789): n is a, c, g, or t
  misc_feature (809)..(809): n is a, c, g, or t
  misc_feature (838)..(838): n is a, c, g, or t
  misc_feature (840)..(840): n is a, c, g, or t
  misc_feature (842)..(842): n is a, c, g, or t
  misc_feature (853)..(853): n is a, c, g, or t
  misc_feature (856)..(856): n is a, c, g, or t
  misc_feature (867)..(867): n is a, c, g, or t
  misc_feature (870)..(870): n is a, c, g, or t
  misc_feature (874)..(874): n is a, c, g, or t
  misc_feature (881)..(881): n is a, c, g, or t
  misc_feature (899)..(899): n is a, c, g, or t
  misc_feature (901)..(901): n is a, c, g, or t
  misc_feature (903)..(904): n is a, c, g, or t
  misc_feature (910)..(911): n is a, c, g, or t
  misc_feature (915)..(915): n is a, c, g, or t
  misc_feature (917)..(917): n is a, c, g, or t
  misc_feature (919)..(919): n is a, c, g, or t
  misc_feature (924)..(924): n is a, c, g, or t
  misc_feature (933)..(934): n is a, c, g, or t
  misc_feature (938)..(938): n is a, c, g, or t
  misc_feature (943)..(943): n is a, c, g, or t
  misc_feature (947)..(947): n is a, c, g, or t
  misc_feature (955)..(955): n is a, c, g, or t
  misc_feature (957)..(957): n is a, c, g, or t
  misc_feature (962)..(962): n is a, c, g, or t
  misc_feature (969)..(969): n is a, c, g, or t
  misc_feature (974)..(974): n is a, c, g, or t
  misc_feature (979)..(979): n is a, c, g, or t
  misc_feature (983)..(983): n is a, c, g, or t
  misc_feature (1001)..(1002): n is a, c, g, or t
  misc_feature (1011)..(1012): n is a, c, g, or t
  misc_feature (1015)..(1015): n is a, c, g, or t
  misc_feature (1017)..(1017): n is a, c, g, or t
  misc_feature (1024)..(1024): n is a, c, g, or t
  misc_feature (1030)..(1030): n is a, c, g, or t
  misc_feature (1037)..(1037): n is a, c, g, or t
  misc_feature (1044)..(1044): n is a, c, g, or t
  misc_feature (1049)..(1049): n is a, c, g, or t
  misc_feature (1053)..(1053): n is a, c, g, or t
  misc_feature (1056)..(1056): n is a, c, g, or t
  misc_feature (1058)..(1058): n is a, c, g, or t
  misc_feature (1062)..(1063): n is a, c, g, or t
  misc_feature (1066)..(1066): n is a, c, g, or t
  misc_feature (1075)..(1075): n is a, c, g, or t
  misc_feature (1078)..(1078): n is a, c, g, or t
  misc_feature (1081)..(1081): n is a, c, g, or t
  misc_feature (1085)..(1085): n is a, c, g, or t
  misc_feature (1087)..(1087): n is a, c, g, or t
  misc_feature (1090)..(1091): n is a, c, g, or t
  misc_feature (1105)..(1105): n is a, c, g, or t
  misc_feature (1110)..(1112): n is a, c, g, or t
  misc_feature (1115)..(1115): n is a, c, g, or t
  misc_feature (1125)..(1125): n is a, c, g, or t
  misc_feature (1135)..(1135): n is a, c, g, or t
  misc_feature (1137)..(1137): n is a, c, g, or t
  misc_feature (1140)..(1141): n is a, c, g, or t
  misc_feature (1146)..(1147): n is a, c, g, or t
  misc_feature (1153)..(1154): n is a, c, g, or t
  misc_feature (1159)..(1159): n is a, c, g, or t
  misc_feature (1162)..(1163): n is a, c, g, or t
  misc_feature (1169)..(1169): n is a, c, g, or t
  misc_feature (1171)..(1172): n is a, c, g, or t
  misc_feature (1175)..(1177): n is a, c, g, or t
  misc_feature (1185)..(1185): n is a, c, g, or t
  misc_feature (1189)..(1189): n is a, c, g, or t
  misc_feature (1191)..(1191): n is a, c, g, or t
  misc_feature (1200)..(1200): n is a, c, g, or t
aantaangattagccagcttggtaccgagctcggatccactagtaanggcngnnagtgtgctgnaattcnnccttaacgtggtcgcggccgaggtactatgtatttgctctngaagtttcnggantcntgntnctggnntattgcnnnnttaggatgnatcacagnagaggnnnntatatntttttnggtnctnatctctantntcctcccgggccgccatccctnggcnnccnnncngganncgnttcgngcgtacgngcnngnaagncggcncgcaaatctgatgntnagcncngncgccccgnggcccccatccatgtcngccgangaaatggtgcaaatccgcctgnaggaccgctgctacccggtgagcaagaggaanctcatcgagcagagcgactacttccgcgccctctaccgctccggcatgcgcgaggccctgagccaggaggccgncngcccgnaggtgcagcagctgcgcgncctcagcgcgccgggcctgcggctggtgctggacttcatcaacgccggcgnngcccgcgaaggctggctcctgggcccgcgcgaggaaaagggcggcggggtggacgangacnagganatggatgaggtgagcctgctgtccgagctngtnaaggcngcctccttcctgcaggtcacgtccctgctgcagctgctgctgtcccaggtgcggctcaataactgccctgnanatgtaacgcctgacgcaagtgtactggncttgcccgacctgnaagaagccntgcctgcgctttcatggttcatcnactttccacaaagtgctgtncaaacccccaatttcccacctccttgaantntncctccccaaanctncaaggggaatnttnatcnctgaaancaaaaagcttaaggaagncncnnaaatanntggnantncatgncctccttgnncccntcagngaantttcctgnanggaancccttgnccccntcacncccnaccaaagggggaaacccnncctttccannttntnagatatnaaaaanaaataantgaaccnttttntttnccnantgannaanaaacctttnctnccnaaantnatnnaaagtcaaaagganaaatnnnacnactccctttnctggaaaatnanccnnttttnnaaggannaaaanaannaatttntnnccnnnaatatccntttnanattaaaaan

SEQ ID NO: 890 - DNA, 1366 bp, Homo Sapiens
  misc_feature (899)..(899): n is a, c, g, or t
  misc_feature (931)..(931): n is a, c, g, or t
  misc_feature (967)..(967): n is a, c, g, or t
  misc_feature (982)..(982): n is a, c, g, or t
  misc_feature (992)..(992): n is a, c, g, or t
  misc_feature (1011)..(1011): n is a, c, g, or t
  misc_feature (1017)..(1017): n is a, c, g, or t
  misc_feature (1019)..(1019): n is a, c, g, or t
  misc_feature (1027)..(1027): n is a, c, g, or t
  misc_feature (1044)..(1044): n is a, c, g, or t
  misc_feature (1057)..(1057): n is a, c, g, or t
  misc_feature (1068)..(1068): n is a, c, g, or t
  misc_feature (1072)..(1072): n is a, c, g, or t
  misc_feature (1076)..(1076): n is a, c, g, or t
  misc_feature (1082)..(1082): n is a, c, g, or t
  misc_feature (1093)..(1093): n is a, c, g, or t
  misc_feature (1095)..(1096): n is a, c, g, or t
  misc_feature (1100)..(1100): n is a, c, g, or t
  misc_feature (1108)..(1108): n is a, c, g, or t
  misc_feature (1110)..(1113): n is a, c, g, or t
  misc_feature (1117)..(1117): n is a, c, g, or t
  misc_feature (1121)..(1121): n is a, c, g, or t
  misc_feature (1124)..(1124): n is a, c, g, or t
  misc_feature (1130)..(1130): n is a, c, g, or t
  misc_feature (1135)..(1135): n is a, c, g, or t
  misc_feature (1141)..(1141): n is a, c, g, or t
  misc_feature (1144)..(1144): n is a, c, g, or t
  misc_feature (1147)..(1147): n is a, c, g, or t
  misc_feature (1150)..(1150): n is a, c, g, or t
  misc_feature (1157)..(1159): n is a, c, g, or t
  misc_feature (1161)..(1161): n is a, c, g, or t
  misc_feature (1166)..(1167): n is a, c, g, or t
  misc_feature (1170)..(1170): n is a, c, g, or t
  misc_feature (1179)..(1179): n is a, c, g, or t
  misc_feature (1184)..(1186): n is a, c, g, or t
  misc_feature (1198)..(1199): n is a, c, g, or t
  misc_feature (1203)..(1203): n is a, c, g, or t
  misc_feature (1209)..(1209): n is a, c, g, or t
  misc_feature (1212)..(1212): n is a, c, g, or t
  misc_feature (1221)..(1221): n is a, c, g, or t
  misc_feature (1227)..(1227): n is a, c, g, or t
  misc_feature (1233)..(1233): n is a, c, g, or t
  misc_feature (1240)..(1240): n is a, c, g, or t
  misc_feature (1243)..(1243): n is a, c, g, or t
  misc_feature (1248)..(1248): n is a, c, g, or t
  misc_feature (1257)..(1257): n is a, c, g, or t
  misc_feature (1265)..(1265): n is a, c, g, or t
  misc_feature (1268)..(1268): n is a, c, g, or t
  misc_feature (1271)..(1271): n is a, c, g, or t
  misc_feature (1277)..(1278): n is a, c, g, or t
  misc_feature (1284)..(1284): n is a, c, g, or t
  misc_feature (1291)..(1291): n is a, c, g, or t
  misc_feature (1295)..(1297): n is a, c, g, or t
  misc_feature (1303)..(1303): n is a, c, g, or t
  misc_feature (1307)..(1310): n is a, c, g, or t
  misc_feature (1312)..(1320): n is a, c, g, or t
  misc_feature (1324)..(1330): n is a, c, g, or t
  misc_feature (1332)..(1332): n is a, c, g, or t
  misc_feature (1338)..(1341): n is a, c, g, or t
  misc_feature (1348)..(1348): n is a, c, g, or t
  misc_feature (1352)..(1353): n is a, c, g, or t
  misc_feature (1355)..(1359): n is a, c, g, or t
  misc_feature (1362)..(1364): n is a, c, g, or t
  misc_feature (1366)..(1366): n is a, c, g, or t
tagagaaattactatgagaggatcgcatcaccatcaccatcacggatcctatttaggtgacactatagaatcgtcgacccacgcgtccgaacagaaagaagagtgtacaatccgtggccggagcctgatccagattagcatccaggaggacccctggaacctccccaactccatcaagaccctggtggacaacattcagagatatgtggaagatgggaagaaccagctgctcctggccttgctgaagtgcacagacacggagctgcagctgcgcagagacgcgatcttctgccaggccctggtggccgccgtgtgcaccttctccgagcagctgctggcggccctgggctaccgctacaacaacaatggcgagtacgaggagagcagccgcgacgccagccgcaagtggctggagcaggtggcggccacgggcgtcctgctgcactgccagtccctgctctcgccagccacagtgaaggaggaacggaccatgctggaggacatctgggtgacgctgtcagagctggacaatgtcaccttctcctttaagcagctggacgagaactatgtggccaacaccaacgtcttctaccacattgagggcagccggcaggcgctgaaggtcatcttctacctcgacagctaccacttctccaagctgccctcccgcctggagggtggggccagcctgaggctgcacacagcgctgttcacgaaagtgctggagaacgtggaggggctgccttctccaggcagccaggccgcggaggatttgcagcaggacatcaacgcgcagtccctggagaaagttcagcagtattaccgcaaactcagggcattttacctggagcggtctaacctgcccacggatgccagcaccacggcggtaaagatagacnagctgatccgccccatcaatgccctggatganctctgccgcctcatgaagtcctttgtccacccaaancctggtgctgctggnattgtgggcnccggcctcatcccatctcntcgaantntgctaccncctgggggcctgccaanggtcatgtgtggnaaaggcatgcnaaanaacncctgancgtgtccctgnannaggngccatttngnnnngaancccnggnttgctnccaantgcttntgnagnccnggaaatnnngngaaannggnccagggggnaaatnnngccaaaaacttnnaatnagaacnaanccccagggnttcccncccttnccccttnccnccccnggggagggnactttaanccnatncccccnngggccnccccttngatnnnttttgnaaannnngnnnnnnnnntttnnnnnnncnagtttnnnnccctttngaanncnnnnnccnnntn

SEQ ID NO: 891 - DNA, 1200 bp, Homo Sapiens
  misc_feature (1)..(1): n is a, c, g, or t
  misc_feature (5)..(5): n is a, c, g, or t
  misc_feature (952)..(952): n is a, c, g, or t
  misc_feature (971)..(971): n is a, c, g, or t
  misc_feature (1012)..(1012): n is a, c, g, or t
  misc_feature (1020)..(1020): n is a, c, g, or t
  misc_feature (1032)..(1032): n is a, c, g, or t
  misc_feature (1034)..(1034): n is a, c, g, or t
  misc_feature (1039)..(1039): n is a, c, g, or t
  misc_feature (1043)..(1043): n is a, c, g, or t
  misc_feature (1056)..(1056): n is a, c, g, or t
  misc_feature (1061)..(1061): n is a, c, g, or t
  misc_feature (1071)..(1071): n is a, c, g, or t
  misc_feature (1075)..(1075): n is a, c, g, or t
  misc_feature (1093)..(1093): n is a, c, g, or t
  misc_feature (1100)..(1100): n is a, c, g, or t
  misc_feature (1102)..(1102): n is a, c, g, or t
  misc_feature (1104)..(1104): n is a, c, g, or t
  misc_feature (1106)..(1106): n is a, c, g, or t
  misc_feature (1110)..(1111): n is a, c, g, or t
  misc_feature (1127)..(1127): n is a, c, g, or t
  misc_feature (1129)..(1130): n is a, c, g, or t
  misc_feature (1133)..(1133): n is a, c, g, or t
  misc_feature (1148)..(1148): n is a, c, g, or t
  misc_feature (1160)..(1160): n is a, c, g, or t
  misc_feature (1178)..(1178): n is a, c, g, or t
  misc_feature (1181)..(1181): n is a, c, g, or t
  misc_feature (1200)..(1200): n is a, c, g, or t
naatngagaaattactatgagaggatcgcatcaccatcaccatcacggatcctatttaggtgacactatagaatcgtcgacccacgcgtccgtccacttcctgctgctactggcagaccgggtggaggcagtgtgcacactgaccgggcaggtggtgctgcgggatcacttcctggagaaatttgggccgctgaagcacatggtgaaggactcctccacaggccagctgtgggcctacactgagcgggctgtcttccgctaccacgtgcaacgggaggcccgagatgtctggcgcacctatctggacatgaaccgcttcgatctggccaaagagtattgtcgagagcggcccgactgcctggacacggtcctggcccgggaggccgatttctgctttcgccagcgtcgctacctggagagcgcacgctgctatgccctgacccagagctactttgaggagattgccctcaagttcctggaggcccgacaggaggaggctctggctgagttcctgcagcgaaaactggccagtttgaagccagccgaacgtacccaggccacactgctgaccacctggctgacagagctctacctgagccggcttggggctctgcagggcgacccagaggccctgactctctaccgagaaaccaaggaatgctttcgaaccttcctcagcagcccccgccacaaagagtggctctttgccagccgggcctctatccatgagctgctcgccagtcatggggacacagaacacatggtgtactttgcagtgatcatgcaggactatgagcgggtggtggcttaccactgtcagcacgaggcctacgaggaggccctggccgtgctcgcccgccaccgtgaccccccagctcttctacaagttctcacccatcctcatccgtcacatcccccgccagcttgtaaatgcctggattgaaatgggcanccggctggatgctcgtcanctcattcctggccctggtgaactaaagccaggggtggtganggtccacnaggtgaaccagncnatccnctanatggaattctgcntgaanctgctggggnaaantgaacaggcatccaaaantacctgntntncntgtnngcccgtggccggccgnannccntattggcctattggnaaaaggttgggnccaccccccccgggggantanaacctcaaaatggccctgn

SEQ ID NO: 892 - DNA, 1389 bp, Homo Sapiens
  misc_feature (833)..(833): n is a, c, g, or t
  misc_feature (840)..(840): n is a, c, g, or t
  misc_feature (847)..(847): n is a, c, g, or t
  misc_feature (856)..(856): n is a, c, g, or t
  misc_feature (861)..(861): n is a, c, g, or t
  misc_feature (880)..(880): n is a, c, g, or t
  misc_feature (883)..(883): n is a, c, g, or t
  misc_feature (886)..(886): n is a, c, g, or t
  misc_feature (898)..(898): n is a, c, g, or t
  misc_feature (920)..(920): n is a, c, g, or t
  misc_feature (935)..(935): n is a, c, g, or t
  misc_feature (941)..(941): n is a, c, g, or t
  misc_feature (950)..(950): n is a, c, g, or t
  misc_feature (955)..(955): n is a, c, g, or t
  misc_feature (966)..(966): n is a, c, g, or t
  misc_feature (970)..(971): n is a, c, g, or t
  misc_feature (976)..(977): n is a, c, g, or t
  misc_feature (979)..(980): n is a, c, g, or t
  misc_feature (986)..(987): n is a, c, g, or t
  misc_feature (991)..(992): n is a, c, g, or t
  misc_feature (1000)..(1001): n is a, c, g, or t
  misc_feature (1003)..(1003): n is a, c, g, or t
  misc_feature (1010)..(1010): n is a, c, g, or t
  misc_feature (1021)..(1023): n is a, c, g, or t
  misc_feature (1028)..(1030): n is a, c, g, or t
  misc_feature (1034)..(1035): n is a, c, g, or t
  misc_feature (1037)..(1037): n is a, c, g, or t
  misc_feature (1040)..(1040): n is a, c, g, or t
  misc_feature (1042)..(1042): n is a, c, g, or t
  misc_feature (1044)..(1045): n is a, c, g, or t
  misc_feature (1051)..(1051): n is a, c, g, or t
  misc_feature (1054)..(1055): n is a, c, g, or t
  misc_feature (1057)..(1059): n is a, c, g, or t
  misc_feature (1072)..(1073): n is a, c, g, or t
  misc_feature (1075)..(1076): n is a, c, g, or t
  misc_feature (1080)..(1085): n is a, c, g, or t
  misc_feature (1088)..(1089): n is a, c, g, or t
  misc_feature (1091)..(1091): n is a, c, g, or t
  misc_feature (1093)..(1093): n is a, c, g, or t
  misc_feature (1095)..(1096): n is a, c, g, or t
  misc_feature (1098)..(1098): n is a, c, g, or t
  misc_feature (1100)..(1100): n is a, c, g, or t
  misc_feature (1102)..(1105): n is a, c, g, or t
  misc_feature (1107)..(1109): n is a, c, g, or t
  misc_feature (1112)..(1115): n is a, c, g, or t
  misc_feature (1117)..(1117): n is a, c, g, or t
  misc_feature (1119)..(1119): n is a, c, g, or t
  misc_feature (1123)..(1125): n is a, c, g, or t
  misc_feature (1132)..(1132): n is a, c, g, or t
  misc_feature (1134)..(1134): n is a, c, g, or t
  misc_feature (1136)..(1139): n is a, c, g, or t
  misc_feature (1150)..(1156): n is a, c, g, or t
  misc_feature (1160)..(1162): n is a, c, g, or t
  misc_feature (1164)..(1164): n is a, c, g, or t
  misc_feature (1166)..(1167): n is a, c, g, or t
  misc_feature (1171)..(1171): n is a, c, g, or t
  misc_feature (1174)..(1176): n is a, c, g, or t
  misc_feature (1179)..(1179): n is a, c, g, or t
  misc_feature (1181)..(1183): n is a, c, g, or t
  misc_feature (1185)..(1189): n is a, c, g, or t
  misc_feature (1191)..(1191): n is a, c, g, or t
  misc_feature (1194)..(1204): n is a, c, g, or t
  misc_feature (1206)..(1206): n is a, c, g, or t
  misc_feature (1209)..(1219): n is a, c, g, or t
  misc_feature (1224)..(1235): n is a, c, g, or t
  misc_feature (1237)..(1241): n is a, c, g, or t
  misc_feature (1244)..(1252): n is a, c, g, or t
  misc_feature (1254)..(1262): n is a, c, g, or t
  misc_feature (1265)..(1281): n is a, c, g, or t
  misc_feature (1285)..(1306): n is a, c, g, or t
  misc_feature (1309)..(1314): n is a, c, g, or t
  misc_feature (1316)..(1344): n is a, c, g, or t
  misc_feature (1346)..(1373): n is a, c, g, or t
  misc_feature (1376)..(1389): n is a, c, g, or t
taatagagaaattactatgagaggatcgcatcaccatcaccatcacggatcctatttaggtgacactatagaatcgtcgacccacgcgtccggctgtgacgactcagccctggcacgaagcccagcccgcggcctgctgggctctcggctgagcaaaatctattcccagtccaccctgtcactgtccactgtggccaacgaggcccacaataacctcggggtgaagaggcccacgtctcgggctccctccccgtcaggtctcatgtccccaagccgcctgcctggaagccgcgaacgggactgggaaaatggcagcaatgcctcctccccagcgtcagtgcccgagtacacaggtccacggctgtacaaagaacccagcgccaagtccaacaagttcatcatccacaatgccctatcacactgctgcctggcgggcaaggtgaacgaaccgcagaagaatcgcattctggaggaaattgagaaaagcaaggccaaccacttcctgatcctctttcgcgactcgagctgccagttccgggcgctctacacgctgtcgggggagacagaggagctgtcgcggctggcagggtatgggccccggaccgtcacgcccgccatggtggaaggcatctacaagtacaactcggaccgcaagcgcttcacccagatccccgccaagaccatgtccatgagcgtcgatgccttcaccatccagggacacctctggcagggcaagaaacccaccactcccaagaagggcggcggcacccccaaatagccccacccgggcggtccacgggccgggccctgtgtgctgcggccgctccctatantgagtcntattaancttaattanctgancttggactcctgttgatanatncantaatgacctcanaactccatctggatttgttcanaacgctcggttgccnccgggngtttttttnttggngaaaatccaanctannttggnnannattttnngganntaaggaanntnaaatggnaaaaaaaaatnnntggannnaccnncnttnananntcccanggnntnnnaaaaaaattttgnngnntttnnnnnnttnntnangnncnanannnnannnttnnnngnanttannnctttttnanannnnaaaaaaaaaannnnnnntttnnncngnntttnttnnnttntnnncnnnnnanaannnnnnnnnnnanttnnnnnnnnnnnaaaannnnnnnnnnnnannnnnaannnnnnnnntnnnnnnnnnttnnnnnnnnnnnnnnnnntttnnnnnnnnnnnnnnnnnnnnnnttnnnnnntnnnnnnnnnnnnnnnnnnnnnnnnnnnnnannnnnnnnnnnnnnnnnnnnnnnnnnnnttnnnnnnnnnnnnnn

SEQ ID NO: 893 - DNA, 1261 bp, Homo Sapiens
  misc_feature (879)..(879): n is a, c, g, or t
  misc_feature (896)..(896): n is a, c, g, or t
  misc_feature (917)..(917): n is a, c, g, or t
  misc_feature (925)..(925): n is a, c, g, or t
  misc_feature (932)..(932): n is a, c, g, or t
  misc_feature (962)..(964): n is a, c, g, or t
  misc_feature (1006)..(1006): n is a, c, g, or t
  misc_feature (1010)..(1010): n is a, c, g, or t
  misc_feature (1017)..(1017): n is a, c, g, or t
  misc_feature (1020)..(1020): n is a, c, g, or t
  misc_feature (1024)..(1024): n is a, c, g, or t
  misc_feature (1026)..(1026): n is a, c, g, or t
  misc_feature (1034)..(1034): n is a, c, g, or t
  misc_feature (1045)..(1045): n is a, c, g, or t
  misc_feature (1052)..(1052): n is a, c, g, or t
  misc_feature (1055)..(1055): n is a, c, g, or t
  misc_feature (1059)..(1059): n is a, c, g, or t
  misc_feature (1061)..(1061): n is a, c, g, or t
  misc_feature (1065)..(1065): n is a, c, g, or t
  misc_feature (1069)..(1069): n is a, c, g, or t
  misc_feature (1071)..(1071): n is a, c, g, or t
  misc_feature (1082)..(1083): n is a, c, g, or t
  misc_feature (1087)..(1087): n is a, c, g, or t
  misc_feature (1094)..(1094): n is a, c, g, or t
  misc_feature (1107)..(1107): n is a, c, g, or t
  misc_feature (1113)..(1113): n is a, c, g, or t
  misc_feature (1130)..(1130): n is a, c, g, or t
  misc_feature (1137)..(1137): n is a, c, g, or t
  misc_feature (1141)..(1141): n is a, c, g, or t
  misc_feature (1151)..(1151): n is a, c, g, or t
  misc_feature (1159)..(1159): n is a, c, g, or t
  misc_feature (1162)..(1162): n is a, c, g, or t
  misc_feature (1175)..(1176): n is a, c, g, or t
  misc_feature (1178)..(1179): n is a, c, g, or t
  misc_feature (1182)..(1183): n is a, c, g, or t
  misc_feature (1187)..(1187): n is a, c, g, or t
  misc_feature (1192)..(1194): n is a, c, g, or t
  misc_feature (1198)..(1199): n is a, c, g, or t
  misc_feature (1205)..(1205): n is a, c, g, or t
  misc_feature (1212)..(1212): n is a, c, g, or t
  misc_feature (1214)..(1214): n is a, c, g, or t
  misc_feature (1218)..(1219): n is a, c, g, or t
  misc_feature (1226)..(1227): n is a, c, g, or t
  misc_feature (1232)..(1234): n is a, c, g, or t
  misc_feature (1238)..(1238): n is a, c, g, or t
  misc_feature (1247)..(1247): n is a, c, g, or t
  misc_feature (1253)..(1253): n is a, c, g, or t
  misc_feature (1258)..(1258): n is a, c, g, or t
tagagaaattactatgagaggatcgcatcaccatcaccatcacggatcctatttaggtgacactatagaatcgtcgacccacgcgtccgcggacgcgtggggtgaattggatgcagtgtccctgttagtcatgggctgttttgtcgaacttaatcaaaggctgttttcttgttgtagccagattctttggatcggaggcaggaatcctggagaagatgttgagaggtttaagcaacaaggtgggaacatcattgtggccactccaggccgcttggaggacatgttccggaggaaggccgaaggcttggatctggccagctgtgtgcgatccctggatgtcctggtgttggatgaggcagacagacttctggacatggggtttgaggcaagcatcaacaccattctggagtttttgccaaagcagaggagaacaggccttttctctgccactcagacgcaggaagtggagaacctggtgagagcgggcctccggaaccctgtccgggtctcagtgaaggagaagggcgtggcagccagcagtgcccagaagaccccctcccgcctggaaaactactacatggtatgcaaggcagatgagaaatttaatcagctggtccattttcttcgcaatcataagcaggagaaacacctggtcttcttcagcacctgtgcctgtgtggaatactatgggaaggctctggaagtgctggtgaagggcgtgaagattatgtgcattcacggaaagatgaaatataaacgcaataagatcttcatggagttccgcaaattgcaaagtgggattttagtgtgcactgatgtgatggcccggggaattgatattcctgaagtcaactgggttttgcagtatgaccctcccancaatgcaagtgccttcntgcatcgctgcggtcgcacanctcgcatnggccacngggggcagcgctctggtgttcctcctgccnnngaaaaatcatacatcaatttccttgcattaaccaaaaaattntganggggaanccngggnantgatgccncccaggaaggnaaaaagnggnatgntngtgnttgnangcccccctgcnnaaanaaccccnaaaaaaccaacgnaccttntgccaaaaatcaatccntggcccnggtnaaaaaatttntttaaaangcntaaaactttttgnncnnatnncccnccttnnncaannctgaangcccccngntttnnaaaaaannatttnnntttnccccccttncccaanttttnccc

SEQ ID NO: 894 - DNA, 1405 bp, Homo Sapiens
  misc_feature (1)..(1): n is a, c, g, or t
  misc_feature (7)..(13): n is a, c, g, or t
  misc_feature (917)..(917): n is a, c, g, or t
  misc_feature (933)..(933): n is a, c, g, or t
  misc_feature (945)..(945): n is a, c, g, or t
  misc_feature (948)..(948): n is a, c, g, or t
  misc_feature (953)..(953): n is a, c, g, or t
  misc_feature (967)..(967): n is a, c, g, or t
  misc_feature (972)..(972): n is a, c, g, or t
  misc_feature (984)..(984): n is a, c, g, or t
  misc_feature (997)..(997): n is a, c, g, or t
  misc_feature (1007)..(1007): n is a, c, g, or t
  misc_feature (1011)..(1011): n is a, c, g, or t
  misc_feature (1026)..(1026): n is a, c, g, or t
  misc_feature (1031)..(1031): n is a, c, g, or t
  misc_feature (1042)..(1042): n is a, c, g, or t
  misc_feature (1044)..(1044): n is a, c, g, or t
  misc_feature (1054)..(1054): n is a, c, g, or t
  misc_feature (1059)..(1059): n is a, c, g, or t
  misc_feature (1075)..(1076): n is a, c, g, or t
  misc_feature (1079)..(1079): n is a, c, g, or t
  misc_feature (1084)..(1084): n is a, c, g, or t
  misc_feature (1086)..(1086): n is a, c, g, or t
  misc_feature (1088)..(1088): n is a, c, g, or t
  misc_feature (1099)..(1099): n is a, c, g, or t
  misc_feature (1106)..(1106): n is a, c, g, or t
  misc_feature (1109)..(1109): n is a, c, g, or t
  misc_feature (1124)..(1124): n is a, c, g, or t
  misc_feature (1126)..(1126): n is a, c, g, or t
  misc_feature (1128)..(1128): n is a, c, g, or t
  misc_feature (1132)..(1133): n is a, c, g, or t
  misc_feature (1143)..(1143): n is a, c, g, or t
  misc_feature (1148)..(1148): n is a, c, g, or t
  misc_feature (1152)..(1152): n is a, c, g, or t
  misc_feature (1154)..(1156): n is a, c, g, or t
  misc_feature (1158)..(1159): n is a, c, g, or t
  misc_feature (1167)..(1167): n is a, c, g, or t
  misc_feature (1171)..(1171): n is a, c, g, or t
  misc_feature (1173)..(1173): n is a, c, g, or t
  misc_feature (1182)..(1183): n is a, c, g, or t
  misc_feature (1195)..(1196): n is a, c, g, or t
  misc_feature (1202)..(1202): n is a, c, g, or t
  misc_feature (1217)..(1217): n is a, c, g, or t
  misc_feature (1220)..(1220): n is a, c, g, or t
  misc_feature (1224)..(1224): n is a, c, g, or t
  misc_feature (1226)..(1226): n is a, c, g, or t
  misc_feature (1229)..(1229): n is a, c, g, or t
  misc_feature (1233)..(1233): n is a, c, g, or t
  misc_feature (1236)..(1236): n is a, c, g, or t
  misc_feature (1243)..(1244): n is a, c, g, or t
  misc_feature (1251)..(1251): n is a, c, g, or t
  misc_feature (1255)..(1256): n is a, c, g, or t
  misc_feature (1260)..(1260): n is a, c, g, or t
  misc_feature (1262)..(1262): n is a, c, g, or t
  misc_feature (1267)..(1268): n is a, c, g, or t
  misc_feature (1271)..(1271): n is a, c, g, or t
  misc_feature (1281)..(1281): n is a, c, g, or t
  misc_feature (1287)..(1289): n is a, c, g, or t
  misc_feature (1292)..(1294): n is a, c, g, or t
  misc_feature (1297)..(1301): n is a, c, g, or t
  misc_feature (1303)..(1304): n is a, c, g, or t
  misc_feature (1311)..(1318): n is a, c, g, or t
  misc_feature (1324)..(1324): n is a, c, g, or t
  misc_feature (1334)..(1334): n is a, c, g, or t
  misc_feature (1337)..(1339): n is a, c, g, or t
  misc_feature (1341)..(1342): n is a, c, g, or t
  misc_feature (1349)..(1349): n is a, c, g, or t
  misc_feature (1354)..(1354): n is a, c, g, or t
  misc_feature (1356)..(1357): n is a, c, g, or t
  misc_feature (1361)..(1363): n is a, c, g, or t
  misc_feature (1366)..(1371): n is a, c, g, or t
  misc_feature (1373)..(1380): n is a, c, g, or t
  misc_feature (1382)..(1386): n is a, c, g, or t
  misc_feature (1390)..(1390): n is a, c, g, or t
  misc_feature (1400)..(1403): n is a, c, g, or t
  misc_feature (1405)..(1405): n is a, c, g, or t
ntttccnnnnnnnatttagagatattactatgagaggatcgcatcaccatcaccatcacggatcctatttaggtgacactatagaatcgtcgacccacgcgtccgatgagcgttacaagaatgagtgccgggagaaggaacgtgaggagattgccagacaggcagccaagatggccgatgaagccatcctgcaggaaagagagagaggaggccctgaggagggagtgcgtgggggccaccctccagccatccagagcctcatcaacctgctggcagacaacaggtacctcactgctgaagagactgacaagatcatcaactacctgcgagagcggaaggagcggctgatgaggagcagcaccgactctctgcctggcccgatttcccgccaaccactcggggcgacctcgggtgcctcgctgaagacacagccaagctcccaaccgctccagagcggccaagtgctcccctctgctacacccactccatctgcaccccccacctcccagcaagagcttcaggccaaaatcctcagcctcttcaatagtggcacagtgacggccaatagcagctctgcatccccctcggttgctgccggaaacaccccaaaccagaatttttccacagcagcaaacagccagcctcaacaaagatcacaggcttctggcaatcagcctccaagcattttgggacagggaggatctgctcagaacatgggccccagacctggggctccttcccaagggctttttggccagccttccagtcgcctggcacctgctagcaacatgactagccagaggcctgtgtcttccacaggtatcaactttgacaatccaagtgtacagaaggctctggataccctgatccagagtggccctgctctctcccacctggttagccagaccacagcacanatggggcagccacagnccccatgggatnttnaccanaggcattactgaanctaantctttcaatttnccccagtcccctnttcccctggnctcntcccatttattgttntaaanaaaactggttngnagaatttttntttgngcttcccaggccgggnntcnagtgncntnaatttttaacnactggtnttnttttttgcccaaggntngngttnntttttccttnaaaantttnannngnntttggggncggnanctttttttnntttttggttttnnaaaaanaaattctccgggggnaanaaangngtngggnttntttttanngggtttncccnncccngnttttnnggntttggacccncccccnnnccnnnttnnnnngnnttttttnnnnnnnncccccntttttttttnaannnanngtttttnttttnanntttnnnaannnnnncnnnnnnnncnnnnnaaanaaaaaaaaannnntn

SEQ ID NO: 895 - DNA, 1200 bp, Homo Sapiens
  misc_feature (3)..(3): n is a, c, g, or t
  misc_feature (863)..(863): n is a, c, g, or t
  misc_feature (867)..(867): n is a, c, g, or t
  misc_feature (891)..(891): n is a, c, g, or t
  misc_feature (940)..(940): n is a, c, g, or t
  misc_feature (948)..(948): n is a, c, g, or t
  misc_feature (951)..(951): n is a, c, g, or t
  misc_feature (986)..(986): n is a, c, g, or t
  misc_feature (992)..(992): n is a, c, g, or t
  misc_feature (1000)..(1000): n is a, c, g, or t
  misc_feature (1014)..(1014): n is a, c, g, or t
  misc_feature (1023)..(1023): n is a, c, g, or t
  misc_feature (1028)..(1029): n is a, c, g, or t
  misc_feature (1037)..(1037): n is a, c, g, or t
  misc_feature (1040)..(1040): n is a, c, g, or t
  misc_feature (1042)..(1042): n is a, c, g, or t
  misc_feature (1054)..(1054): n is a, c, g, or t
  misc_feature (1059)..(1059): n is a, c, g, or t
  misc_feature (1062)..(1062): n is a, c, g, or t
  misc_feature (1068)..(1068): n is a, c, g, or t
  misc_feature (1077)..(1077): n is a, c, g, or t
  misc_feature (1085)..(1086): n is a, c, g, or t
  misc_feature (1088)..(1088): n is a, c, g, or t
  misc_feature (1094)..(1094): n is a, c, g, or t
  misc_feature (1098)..(1098): n is a, c, g, or t
  misc_feature (1107)..(1110): n is a, c, g, or t
  misc_feature (1114)..(1114): n is a, c, g, or t
  misc_feature (1124)..(1124): n is a, c, g, or t
  misc_feature (1136)..(1137): n is a, c, g, or t
  misc_feature (1150)..(1150): n is a, c, g, or t
  misc_feature (1155)..(1155): n is a, c, g, or t
  misc_feature (1158)..(1158): n is a, c, g, or t
  misc_feature (1169)..(1169): n is a, c, g, or t
  misc_feature (1172)..(1175): n is a, c, g, or t
  misc_feature (1180)..(1180): n is a, c, g, or t
  misc_feature (1185)..(1185): n is a, c, g, or t
  misc_feature (1190)..(1190): n is a, c, g, or t
  misc_feature (1193)..(1194): n is a, c, g, or t
  misc_feature (1198)..(1199): n is a, c, g, or t
atngagaaattactatgagaggatcgcatcaccatcaccatcacggatcctatttaggtgacactatagaatcgtcgacccacgcgtccgtgccctgcgaggagaagaaaacctacgactgcagcgagtgtggcaaggcctttagccgaagctcgtccctgataaagcaccaaaggatccacacgggagaaaagccgtttgagtgtgacacctgtgggaagcacttcatcgagcgctcgtccctcaccatccaccagcgggtgcacacgggcgagaagccctatgcctgcggggactgcggcaaggccttcagccagcgcatgaacctcactgtgcaccagcgcacgcacacgggcgagaagccgtatgtgtgcgacgtgtgtggcaaggccttccggaagacttcctctctcacccagcacgagcggatccacacgggggagaagccctacgcgtgcggggactgcggcaaggccttcagccagaacatgcacctcatcgtgcaccagcgcacgcacaccggggagaagccgtacgtgtgccccgagtgcgggcgagccttcagccagaacatgcacctgaccgagcaccagcgcacgcacaccggggagaagccgtacgcctgcaaggagtgcggcaaggccttcaacaagagctcctcgctcaccctgcaccagaggaaccacaccggcgagaagccctacgtgtgcggcgagtgcggcaaggccttcagccagagctcctacctcatccagcaccagcgcttccacatcggcgtgaagccgttcgagtgcagcgagtgcggcaaggccttcagcaagaactcctcgctcacgcagcaccagcgcatccacaccggcganaaanccctacgagtgctacatctgcaanaagcacttcacggggcgctcgtccctcatcgtgcaccaaatcgtgcacnccgggganaanccctacgtgtgcggcgagtgcggcaaggccttcanccaaancgcctacntcatcgagcaccancggatcccnccggnnaaaaaccntananggtgcggccagngcggnaantctttnttcaaaaantcttcctnncntgtgcnccancggattccnnnngggngaaaaacccntaccgatgcggnnaggggggaaaacntttanccncaaaaaaaacngannnnccccntgggnattcnccnngaannc

SEQ ID NO: 896 - DNA, 1200 bp, Homo Sapiens
  misc_feature (856)..(856): n is a, c, g, or t
  misc_feature (899)..(899): n is a, c, g, or t
  misc_feature (921)..(921): n is a, c, g, or t
  misc_feature (991)..(991): n is a, c, g, or t
  misc_feature (1016)..(1016): n is a, c, g, or t
  misc_feature (1026)..(1026): n is a, c, g, or t
  misc_feature (1036)..(1036): n is a, c, g, or t
  misc_feature (1048)..(1048): n is a, c, g, or t
  misc_feature (1052)..(1054): n is a, c, g, or t
  misc_feature (1078)..(1078): n is a, c, g, or t
  misc_feature (1087)..(1087): n is a, c, g, or t
  misc_feature (1091)..(1091): n is a, c, g, or t
  misc_feature (1111)..(1111): n is a, c, g, or t
  misc_feature (1144)..(1144): n is a, c, g, or t
  misc_feature (1148)..(1149): n is a, c, g, or t
  misc_feature (1158)..(1158): n is a, c, g, or t
  misc_feature (1163)..(1163): n is a, c, g, or t
  misc_feature (1173)..(1173): n is a, c, g, or t
  misc_feature (1175)..(1175): n is a, c, g, or t
  misc_feature (1191)..(1191): n is a, c, g, or t
  misc_feature (1195)..(1196): n is a, c, g, or t
tagagaaattactatgagaggatcgcatcaccatcaccatcacggatcctatttaggtgacactatagaatcgtcgacccacgcgtccgagtgtatgtgtaagcacaacacagcaggcagccactgccagcactgtgccccgttatacaatgaccggccatgggaggcagctgatggcaaaacgggggctcccaacgagtgcagaacctgcaagtgtaatgggcatgctgatacctgtcacttcgacgttaatgtgtgggaggcatcagggaatcgtagtggtggtgtctgtgatgactgtcagcacaacacagaaggacagtattgccagaggtgcaagccaggcttctatcgtgacctgcggagacccttctcagctccagatgcttgcaaaccgtgttcctgccatccagtaggatcagctgtccttcctgccaactcagtgaccttctgcgaccccagcaatggtgactgcccttgcaagcctggggtggcagggcgacgttgtgacaggtgcatggtgggatactggggcttcggagactatggctgtcgaccatgtgactgtgcggggagctgtgaccctatcaccggagactgcatcagcagccacacagacatagactggtatcatgaagttcctgacttccgtcccgtgcacaataagagcgaaccagcctgggagtgggaggatgcgcaggggttttctgcacttctacactcaggtaaatgcgaatgtaaggaacagacattaggaaatgccaaggcattctgtggaatgaaatattcatatgtgctaaaaataaagattttatcagctcatgataaaggtactcatgttgaggtcaatgtgaanattaaaaaggtcttaaaatctaccaaactgaaaattttccgangaaaagcgaacattatatccanaatcatggacggacaaaggatgcccttgttccaatcctcaatcctgggtttggaaaaaccttgtaccagnacatgaaggaatttaaaaacaggcnaaactaattngtgaaaaatnaaaaagcttttntccnnncactggaaacccttttcctttggnaaaaaaaanttcntgggaaaatttttaaaaaanaaaagggcaagttaccctttaaaaatgggatancccnntaatgggcnctttnttcttttttncnaaaaaacaaacttttnaaanncaaa

SEQ ID NO: 897 - DNA, 1200 bp, Homo Sapiens
  misc_feature (868)..(868): n is a, c, g, or t
  misc_feature (875)..(875): n is a, c, g, or t
  misc_feature (891)..(891): n is a, c, g, or t
  misc_feature (902)..(902): n is a, c, g, or t
  misc_feature (905)..(905): n is a, c, g, or t
  misc_feature (926)..(926): n is a, c, g, or t
  misc_feature (937)..(937): n is a, c, g, or t
  misc_feature (947)..(947): n is a, c, g, or t
  misc_feature (972)..(972): n is a, c, g, or t
  misc_feature (984)..(984): n is a, c, g, or t
  misc_feature (993)..(993): n is a, c, g, or t
  misc_feature (996)..(996): n is a, c, g, or t
  misc_feature (1007)..(1007): n is a, c, g, or t
  misc_feature (1012)..(1012): n is a, c, g, or t
  misc_feature (1016)..(1016): n is a, c, g, or t
  misc_feature (1025)..(1025): n is a, c, g, or t
  misc_feature (1027)..(1027): n is a, c, g, or t
  misc_feature (1035)..(1035): n is a, c, g, or t
  misc_feature (1040)..(1040): n is a, c, g, or t
  misc_feature (1044)..(1044): n is a, c, g, or t
  misc_feature (1064)..(1064): n is a, c, g, or t
  misc_feature (1076)..(1077): n is a, c, g, or t
  misc_feature (1089)..(1089): n is a, c, g, or t
  misc_feature (1092)..(1092): n is a, c, g, or t
  misc_feature (1094)..(1094): n is a, c, g, or t
  misc_feature (1097)..(1097): n is a, c, g, or t
  misc_feature (1102)..(1102): n is a, c, g, or t
  misc_feature (1110)..(1110): n is a, c, g, or t
  misc_feature (1113)..(1115): n is a, c, g, or t
  misc_feature (1121)..(1122): n is a, c, g, or t
  misc_feature (1124)..(1124): n is a, c, g, or t
  misc_feature (1127)..(1127): n is a, c, g, or t
  misc_feature (1137)..(1137): n is a, c, g, or t
  misc_feature (1150)..(1150): n is a, c, g, or t
  misc_feature (1153)..(1153): n is a, c, g, or t
  misc_feature (1155)..(1155): n is a, c, g, or t
  misc_feature (1164)..(1164): n is a, c, g, or t
  misc_feature (1168)..(1168): n is a, c, g, or t
  misc_feature (1182)..(1182): n is a, c, g, or t
  misc_feature (1189)..(1190): n is a, c, g, or t
atagagaaattaactatgagaggatcgcatcaccatcaccatcacggatcctatttaggtgacactatagaatcgtcgacccacgcgtccgcgtctctgctactggactgtggtgagggcacatttgggcagctgtgccgtcattacggagaccaggtggacagggtcctgggcaccctggctgctgtgtttgtgtcccacctgcacgcagatcaccacacgggcttgccaagtatcttgctgcagagagaacgcgccttggcatctttgggaaagccgcttcaccctttgctggtggttgcccccaaccagctcaaagcctggctccagcagtaccacaaccagtgccaggaggtcctgcaccacatcagtatgattcctgccaaatgccttcaggaaggggctgagatctccagtcctgcagtggaaagattgatcagttcgctgttgcgaacatgtgatttggaagagtttcagacctgtctggtgcggcactgcaagcatgcgtttggctgtgcgctggtgcacacctctggctggaaagtggtctattccggggacaccatgccctgcgaggctctggtccggatggggaaagatgccaccctcctgatacatgaagccaccctggaagatggtttggaagaggaagcagtggaaaagacacacagcacaacgtcccaagccatcagcgtggggatgcggatgaacgcggagttcattatgctgaaccacttcagccagcgctatgccaaggtccccctcttcagccccaacttcagcgagaaagtgggagttgcctttgaccacatgaaggtctgctttggagactttccaacaatgcccaagctgattcccccactgaaancccctgntttgctggcaacatcnaagaaaatggnagnaacgcaaggaaaaaacggganctgcggcaagntgcgggccgnccctcctgtccagggaaactggcangcggcctgaagnaaggggaanccntcaacaaaaancgggncccnccaaaaagnanccccaagnccaanaagntcaaaccccaatagaaaaanttggaaaacccnnaatcaaaaaggnttngnttnttttntcccaaanaannnaccatnntnccncctttgtggnaaaaactaaaaancgntnccccaaagnaatncaaaaaaatgaaanaaacttnnccaaactttg

SEQ ID NO: 898 - DNA, 1234 bp, Homo Sapiens
  misc_feature (812)..(812): n is a, c, g, or t
  misc_feature (835)..(835): n is a, c, g, or t
  misc_feature (876)..(876): n is a, c, g, or t
  misc_feature (900)..(900): n is a, c, g, or t
  misc_feature (908)..(908): n is a, c, g, or t
  misc_feature (916)..(916): n is a, c, g, or t
  misc_feature (945)..(945): n is a, c, g, or t
  misc_feature (972)..(972): n is a, c, g, or t
  misc_feature (983)..(983): n is a, c, g, or t
  misc_feature (987)..(987): n is a, c, g, or t
  misc_feature (1001)..(1001): n is a, c, g, or t
  misc_feature (1004)..(1004): n is a, c, g, or t
  misc_feature (1021)..(1021): n is a, c, g, or t
  misc_feature (1033)..(1033): n is a, c, g, or t
  misc_feature (1060)..(1061): n is a, c, g, or t
  misc_feature (1066)..(1066): n is a, c, g, or t
  misc_feature (1069)..(1069): n is a, c, g, or t
  misc_feature (1071)..(1071): n is a, c, g, or t
  misc_feature (1077)..(1077): n is a, c, g, or t
  misc_feature (1081)..(1081): n is a, c, g, or t
  misc_feature (1091)..(1091): n is a, c, g, or t
  misc_feature (1105)..(1105): n is a, c, g, or t
  misc_feature (1108)..(1108): n is a, c, g, or t
  misc_feature (1111)..(1111): n is a, c, g, or t
  misc_feature (1131)..(1131): n is a, c, g, or t
  misc_feature (1136)..(1136): n is a, c, g, or t
  misc_feature (1138)..(1138): n is a, c, g, or t
  misc_feature (1153)..(1153): n is a, c, g, or t
  misc_feature (1158)..(1158): n is a, c, g, or t
  misc_feature (1164)..(1164): n is a, c, g, or t
  misc_feature (1166)..(1166): n is a, c, g, or t
  misc_feature (1169)..(1169): n is a, c, g, or t
  misc_feature (1175)..(1175): n is a, c, g, or t
  misc_feature (1188)..(1188): n is a, c, g, or t
  misc_feature (1193)..(1193): n is a, c, g, or t
  misc_feature (1200)..(1203): n is a, c, g, or t
  misc_feature (1206)..(1208): n is a, c, g, or t
  misc_feature (1215)..(1215): n is a, c, g, or t
  misc_feature (1218)..(1219): n is a, c, g, or t
  misc_feature (1227)..(1227): n is a, c, g, or t
  misc_feature (1229)..(1231): n is a, c, g, or t
agaaattactatgagaggatcgcatcaccatcaccatcacggatcctatttaggtgacactatagaatcgtcgacccacgcgtccgggactccggcccagaagccggctcgcagcgcctgctgttttctcacgacctggtgtcgggccgttaccgtggctccgtgcacttcgggctggtgcgcctcatccacggcgaggactcggactcggagggcgaggaggagggccgcgggagctcggggtgctccgaggccgggggcgcgggccacgaggagggccgggccagccccctgcgccgcggctacgtgcgcgtccagtggtacccggagggcgtcaagcagcatgtgaaggagaccaagctgaaactagaggaccgttctgtggtgccccgagatgtggtccggcacatgcgatccaccgacagtcagtgtggcacggtgatcgacgtcaacatcgactgtgccgtcaagctcatcggcaccaactgcatcatctatcccgtcaacagcaaggacctgcagcacatctggcccttcatgtatggggactacattgcctatgactgctggctggggaaggtctacgacttgaagaaccagatcatcctgaagctatccaacggcgccaggtgctccatgaacacggaagatggcgccaagctctacgacgtctgcccgcacgtcagcgactcgggtctcttcttcgatgattcctatggcttctacccaggccaggtgctcattggccctgccaagatcttctccagcgtccagtggctgtcaggtgtcaagcccgtgctcagcaccaagancaagttccgagtggtggtggaanaagtgcaggttgtaaagttgaaagttacatggattaccaanagtttctgtccagggggcacgganagcgtcanccccccanccttttgtcatcacccaagaaaaacttangcagggtgaaacgtctcgaatgctttnaccatgctcancggncaacttggggaacnctntctgtatttcttcccanccaaaggtgaancccctgtttaaaaaaacaaggttttgnngaatnatntnatgctncccnaaaaaccaantgttcccgggaacnttnccntggaaaaacccaaaaaaaanggggnantccaaaccaaaaacnaaacngaaatntnccncccctnaaaaaaaaccccnaaggntttcccnnnnccnnngaaaatnccnnaaaaaggntnnnaaa

SEQ ID NO: 899 - DNA, 1408 bp, Homo Sapiens
  misc_feature (2)..(2): n is a, c, g, or t
  misc_feature (912)..(912): n is a, c, g, or t
  misc_feature (946)..(946): n is a, c, g, or t
  misc_feature (961)..(962): n is a, c, g, or t
  misc_feature (964)..(964): n is a, c, g, or t
  misc_feature (983)..(983): n is a, c, g, or t
  misc_feature (985)..(985): n is a, c, g, or t
  misc_feature (988)..(988): n is a, c, g, or t
  misc_feature (992)..(992): n is a, c, g, or t
  misc_feature (994)..(994): n is a, c, g, or t
  misc_feature (998)..(998): n is a, c, g, or t
  misc_feature (1007)..(1007): n is a, c, g, or t
  misc_feature (1020)..(1020): n is a, c, g, or t
  misc_feature (1022)..(1022): n is a, c, g, or t
  misc_feature (1035)..(1035): n is a, c, g, or t
  misc_feature (1054)..(1054): n is a, c, g, or t
  misc_feature (1067)..(1067): n is a, c, g, or t
  misc_feature (1072)..(1072): n is a, c, g, or t
  misc_feature (1075)..(1075): n is a, c, g, or t
  misc_feature (1080)..(1080): n is a, c, g, or t
  misc_feature (1092)..(1093): n is a, c, g, or t
  misc_feature (1095)..(1097): n is a, c, g, or t
  misc_feature (1099)..(1099): n is a, c, g, or t
  misc_feature (1105)..(1105): n is a, c, g, or t
  misc_feature (1118)..(1118): n is a, c, g, or t
  misc_feature (1125)..(1125): n is a, c, g, or t
  misc_feature (1131)..(1131): n is a, c, g, or t
  misc_feature (1164)..(1164): n is a, c, g, or t
  misc_feature (1167)..(1167): n is a, c, g, or t
  misc_feature (1177)..(1178): n is a, c, g, or t
  misc_feature (1183)..(1183): n is a, c, g, or t
  misc_feature (1185)..(1185): n is a, c, g, or t
  misc_feature (1190)..(1190): n is a, c, g, or t
  misc_feature (1194)..(1194): n is a, c, g, or t
  misc_feature (1199)..(1199): n is a, c, g, or t
  misc_feature (1201)..(1201): n is a, c, g, or t
  misc_feature (1209)..(1210): n is a, c, g, or t
  misc_feature (1214)..(1214): n is a, c, g, or t
  misc_feature (1216)..(1217): n is a, c, g, or t
  misc_feature (1223)..(1223): n is a, c, g, or t
  misc_feature (1230)..(1231): n is a, c, g, or t
  misc_feature (1238)..(1238): n is a, c, g, or t
  misc_feature (1241)..(1241): n is a, c, g, or t
  misc_feature (1244)..(1244): n is a, c, g, or t
  misc_feature (1247)..(1247): n is a, c, g, or t
  misc_feature (1249)..(1249): n is a, c, g, or t
  misc_feature (1252)..(1254): n is a, c, g, or t
  misc_feature (1261)..(1261): n is a, c, g, or t
  misc_feature (1271)..(1273): n is a, c, g, or t
  misc_feature (1275)..(1276): n is a, c, g, or t
  misc_feature (1281)..(1281): n is a, c, g, or t
  misc_feature (1287)..(1287): n is a, c, g, or t
  misc_feature (1289)..(1291): n is a, c, g, or t
  misc_feature (1300)..(1301): n is a, c, g, or t
  misc_feature (1304)..(1304): n is a, c, g, or t
  misc_feature (1306)..(1313): n is a, c, g, or t
  misc_feature (1316)..(1316): n is a, c, g, or t
  misc_feature (1325)..(1325): n is a, c, g, or t
  misc_feature (1327)..(1327): n is a, c, g, or t
  misc_feature (1334)..(1334): n is a, c, g, or t
  misc_feature (1338)..(1340): n is a, c, g, or t
  misc_feature (1346)..(1347): n is a, c, g, or t
  misc_feature (1350)..(1357): n is a, c, g, or t
  misc_feature (1360)..(1360): n is a, c, g, or t
  misc_feature (1362)..(1362): n is a, c, g, or t
  misc_feature (1364)..(1364): n is a, c, g, or t
  misc_feature (1368)..(1368): n is a, c, g, or t
  misc_feature (1370)..(1372): n is a, c, g, or t
  misc_feature (1374)..(1375): n is a, c, g, or t
  misc_feature (1377)..(1378): n is a, c, g, or t
  misc_feature (1382)..(1382): n is a, c, g, or t
  misc_feature (1384)..(1388): n is a, c, g, or t
  misc_feature (1390)..(1395): n is a, c, g, or t
  misc_feature (1397)..(1398): n is a, c, g, or t
  misc_feature (1403)..(1403): n is a, c, g, or t
  misc_feature (1405)..(1407): n is a, c, g, or t
anatagagaaattactatgagaggatcgcatcaccatcaccatcacggatcctatttaggtgacactatagaatcgtcgacccacgcgtccgctgccgccggagggggctccccgccggccacctcctgccccgtggcctgctcctgcagcaaccaggccagccgggtgatctgcacacggagagacctggccgaggtcccagccagcatcccggtcaacacgcggtacctgaacctgcaagagaacggcatccaggtgatccggacggacacgttcaagcacctgcggcacctggagattctgcagctgagcaagaacctggtgcgcaagatcgaggtgggcgccttcaacgggctgcccagcctcaacacgctggagctttttgacaaccggctgaccacggtgcccacgcaggccttcgagtacctgtccaagctgcgggagctctggctgcggaacaaccccatcgagagcatcccctcctacgccttcaaccgcgtgccctcgctgcggcgcctggacctgggcgagctcaagcggctggaatacatctcggaggcggccttcgaggggctggtcaacctgcgctacctcaacctgggcatgtgcaacctcaaggacatccccaacctgacggccctggtgcgcctggaggagctggagctgtcgggcaaccggctggacctgatccgcccgggctccttccagggtctcaccagcctgcgcaagctgtggctcatgcacgcccaggtagccaccatcgagcgcaacgccttcgacgacctcaagtcgctggaggagctcaacctgtcccacaacaacctgatgtcgctgccccacgacctcttcacgccccttgcaccgcctcgagcgcgtgcacctcaaccacaacccctggcattgcaactgcnacgtgctctggctgaactggtggctcaaggaaanggtgcccagcaacannangtgctgcgccccgctgttnangcncccncnggcntcaaggggncctacattggggnanctggaacaattcncattttcacctgctatgcnccccgtcattcgnggaanccncccanggaaccttaaanntnnncnaagggnttggtttcccaanttaaatngccccnggggcaccttccagaacctccgtcaattgggtnaancccaaagggnnccttntnaaccnaggnttctnangggggggnntttncnntcctgnttaaggnncctttanttnccnaantnccnnngaaaaangggcaaaaannntnntgggnaaaaantnnncgggaaaannccncnnnnnnnnttnaattttggngngaacccngggnnncggggnnccnnnnnnnnggngncncttngnnntnngnntttnannnnnannnnnnannttttncnnng

SEQ ID NO: 900 - DNA, 1290 bp, Homo Sapiens
  misc_feature (818)..(818): n is a, c, g, or t
  misc_feature (852)..(852): n is a, c, g, or t
  misc_feature (893)..(893): n is a, c, g, or t
  misc_feature (907)..(907): n is a, c, g, or t
  misc_feature (918)..(918): n is a, c, g, or t
  misc_feature (920)..(920): n is a, c, g, or t
  misc_feature (926)..(926): n is a, c, g, or t
  misc_feature (956)..(956): n is a, c, g, or t
  misc_feature (965)..(965): n is a, c, g, or t
  misc_feature (989)..(989): n is a, c, g, or t
  misc_feature (1018)..(1018): n is a, c, g, or t
  misc_feature (1023)..(1023): n is a, c, g, or t
  misc_feature (1025)..(1025): n is a, c, g, or t
  misc_feature (1033)..(1033): n is a, c, g, or t
  misc_feature (1045)..(1045): n is a, c, g, or t
  misc_feature (1047)..(1047): n is a, c, g, or t
  misc_feature (1061)..(1061): n is a, c, g, or t
  misc_feature (1063)..(1063): n is a, c, g, or t
  misc_feature (1073)..(1073): n is a, c, g, or t
  misc_feature (1075)..(1075): n is a, c, g, or t
  misc_feature (1080)..(1080): n is a, c, g, or t
  misc_feature (1091)..(1091): n is a, c, g, or t
  misc_feature (1093)..(1093): n is a, c, g, or t
  misc_feature (1097)..(1097): n is a, c, g, or t
  misc_feature (1101)..(1103): n is a, c, g, or t
  misc_feature (1106)..(1109): n is a, c, g, or t
  misc_feature (1111)..(1113): n is a, c, g, or t
  misc_feature (1119)..(1119): n is a, c, g, or t
  misc_feature (1124)..(1124): n is a, c, g, or t
  misc_feature (1127)..(1127): n is a, c, g, or t
  misc_feature (1129)..(1129): n is a, c, g, or t
  misc_feature (1136)..(1136): n is a, c, g, or t
  misc_feature (1140)..(1140): n is a, c, g, or t
  misc_feature (1147)..(1147): n is a, c, g, or t
  misc_feature (1151)..(1152): n is a, c, g, or t
  misc_feature (1155)..(1156): n is a, c, g, or t
  misc_feature (1172)..(1172): n is a, c, g, or t
  misc_feature (1175)..(1175): n is a, c, g, or t
  misc_feature (1179)..(1179): n is a, c, g, or t
  misc_feature (1190)..(1190): n is a, c, g, or t
  misc_feature (1197)..(1200): n is a, c, g, or t
  misc_feature (1207)..(1207): n is a, c, g, or t
  misc_feature (1210)..(1210): n is a, c, g, or t
  misc_feature (1215)..(1215): n is a, c, g, or t
  misc_feature (1219)..(1220): n is a, c, g, or t
  misc_feature (1230)..(1233): n is a, c, g, or t
  misc_feature (1238)..(1239): n is a, c, g, or t
  misc_feature (1247)..(1247): n is a, c, g, or t
  misc_feature (1251)..(1252): n is a, c, g, or t
  misc_feature (1254)..(1256): n is a, c, g, or t
  misc_feature (1260)..(1260): n is a, c, g, or t
  misc_feature (1262)..(1263): n is a, c, g, or t
  misc_feature (1276)..(1278): n is a, c, g, or t
  misc_feature (1287)..(1287): n is a, c, g, or t
tagagaaattactatgagaggatcgcatcaccatcaccatcacggatcctatttaggtgacactatagaatcgtcgacccacgcgtccgcggacgcgtgggcggagccctgccgtgtgggagctggccgaggagtatctggacatcgtgcgggagcacccctgccccctgtcctacgtccgggcccacctcttcaagctgtggcaccacacgctgcaggtgcaccaggagctgcgagaggagctggccaaggtgaagaccctggagggcatcgctgctgtgagccaggagctgaagctgcggtgtcaggaggagatatccaggcaggagggagcgaagcccaccggcgacttgcccttccactggatctgccagccctacatccggccggggcccagggaggggagcaaggagaaggcaggtgcgcgcagcaagcgggccctggaggaagaggagggtggcacggaggtcctgtccaagaacaagcaaaagaagcagctgaggaacccccacaagaccttcgacccctctctgaagccaaaacatgcaaagtgtgaccagtgtggaaacccaaaggtgagtgggttccggctgcaagccaccaaggcttcagctttgggggtgggcagggtggtctctgcactgcttggggtggcaggtctggtgcccgcccagctgggtttgcaacgtggctcaaggtggcatggatgcctcaggacggccccttgcttccagccaagcccctgcccaggcctggaggggaagagagtctgggtgggttggggtgagggagaggcatctggcttgggagcagttccnagggctgcatccaggccgtgggcatctggcaaangcttcccagtggggctgctccctgctggccagcctggcccngggagtggtgctgncacaggctccnanattttntgtgcccagggcaacaaaatgtgtgttcancctgtgccncggctgctgcaaaaaaccaacctnccaaaaaaactgcaaactgcccaggttcncggantngctttttnaaaaccaaattngnaaaaattttttggncntggaaaaaangnccaanccttgaacttnangaancttnnnccnnnnannncctggnaaaancangngggtttncccnaaatttngggnnaanngccttggcctgaaagnccnaaanccccccccccnaaaattnnnnttgaacntgnaaccntctnntttaaaaaannnnttttnnccgggaantccnngnnntttntnngaaaaaaaccccnnnttccccttnccc

SEQ ID NO: 901 - DNA, 1200 bp, Homo Sapiens
  misc_feature (710)..(710): n is a, c, g, or t
  misc_feature (767)..(767): n is a, c, g, or t
  misc_feature (929)..(929): n is a, c, g, or t
  misc_feature (978)..(979): n is a, c, g, or t
  misc_feature (1000)..(1000): n is a, c, g, or t
  misc_feature (1027)..(1028): n is a, c, g, or t
  misc_feature (1034)..(1034): n is a, c, g, or t
  misc_feature (1041)..(1041): n is a, c, g, or t
  misc_feature (1044)..(1044): n is a, c, g, or t
  misc_feature (1065)..(1067): n is a, c, g, or t
  misc_feature (1091)..(1091): n is a, c, g, or t
  misc_feature (1110)..(1110): n is a, c, g, or t
  misc_feature (1115)..(1115): n is a, c, g, or t
  misc_feature (1122)..(1122): n is a, c, g, or t
  misc_feature (1124)..(1124): n is a, c, g, or t
  misc_feature (1129)..(1129): n is a, c, g, or t
  misc_feature (1134)..(1134): n is a, c, g, or t
  misc_feature (1147)..(1147): n is a, c, g, or t
  misc_feature (1152)..(1152): n is a, c, g, or t
  misc_feature (1163)..(1163): n is a, c, g, or t
  misc_feature (1174)..(1174): n is a, c, g, or t
  misc_feature (1186)..(1186): n is a, c, g, or t
  misc_feature (1193)..(1193): n is a, c, g, or t
  misc_feature (1199)..(1199): n is a, c, g, or t
tagagagaattactatgagaggatcgcatcaccatcaccatcacggatcctatttaggtgacactatagaatcgtcgacccacgcgtccgccctgtcctccagtggtgaaagctgggagactctgccggggaaagaagagcgggaacctccacaggctaaggtgagtgccagcactggcaccagccctggccccggtgctagtgccagtgccggggctggcgccggggccagtgctggcagcaatggcagcaattaccttgaagaagttcgagaaccatctcttcaggaagagcaggcatccctggaagaaggagaaattccttggctccagtaccatgagaatgacagtagcagtgagggggataatgattctggtcacgagttgatgcaacctggggtattcatgctggatggaaacaacaaccttgaagatgactccagtgtgagcgaagacctagaagtggattggagcctctttgatggatttgcagatgggttaggagtggctgaagccatttcctatgtggaccctcagttcctcacctacatggcacttgaagaacgcctggcccaggcaatggaaactgcccttgcgcacttggagtctctcgcagtggatgtagaggtggccaatccaccagcaagcaaggagagcattgacgctcttcccgagatcctggtcactgaagatcatggcgcagttggtcangagatgtgctgccccatctgctgtagcgaatatgtgaagggggaggtggcaactganctgccgtgccaccactatttccacaagcccgtgtgtgtccatctggcttcaaaagtcaggcacctgccccgtgtgccgctgcatgttccctccccccactctaaaaaaccaaggccgtttactcctggtctgaattattttccccatctgaaatcccccaanactgcaaggagccctctttgaaattaacaatgggaaataaaaccaatcnntccatttaaccctaaacctantgattcccccgggaatattttccaatnngaaaanagttgtngtntgaattgccttaaaaatccannnccctctttttaaggttaaaaaaanggaaaactaaacctttctnaatgncaacttngnaaatngcaanaaaaaaaaaaccnttttncaaccggaaanttaaatcccantttttttcctcnaaaaaanggaaang

SEQ ID NO: 902 - DNA, 1400 bp, Homo Sapiens
  misc_feature (1)..(2): n is a, c, g, or t
  misc_feature (842)..(842): n is a, c, g, or t
  misc_feature (859)..(859): n is a, c, g, or t
  misc_feature (876)..(876): n is a, c, g, or t
  misc_feature (889)..(889): n is a, c, g, or t
  misc_feature (909)..(909): n is a, c, g, or t
  misc_feature (912)..(912): n is a, c, g, or t
  misc_feature (917)..(917): n is a, c, g, or t
  misc_feature (922)..(922): n is a, c, g, or t
  misc_feature (927)..(927): n is a, c, g, or t
  misc_feature (971)..(971): n is a, c, g, or t
  misc_feature (979)..(979): n is a, c, g, or t
  misc_feature (985)..(985): n is a, c, g, or t
  misc_feature (987)..(987): n is a, c, g, or t
  misc_feature (997)..(997): n is a, c, g, or t
  misc_feature (1005)..(1005): n is a, c, g, or t
  misc_feature (1007)..(1008): n is a, c, g, or t
  misc_feature (1029)..(1029): n is a, c, g, or t
  misc_feature (1033)..(1033): n is a, c, g, or t
  misc_feature (1037)..(1037): n is a, c, g, or t
  misc_feature (1039)..(1040): n is a, c, g, or t
  misc_feature (1043)..(1046): n is a, c, g, or t
  misc_feature (1048)..(1050): n is a, c, g, or t
  misc_feature (1052)..(1057): n is a, c, g, or t
  misc_feature (1062)..(1062): n is a, c, g, or t
  misc_feature (1064)..(1064): n is a, c, g, or t
  misc_feature (1070)..(1070): n is a, c, g, or t
  misc_feature (1074)..(1074): n is a, c, g, or t
  misc_feature (1083)..(1083): n is a, c, g, or t
  misc_feature (1085)..(1086): n is a, c, g, or t
  misc_feature (1094)..(1094): n is a, c, g, or t
  misc_feature (1099)..(1099): n is a, c, g, or t
  misc_feature (1103)..(1103): n is a, c, g, or t
  misc_feature (1110)..(1110): n is a, c, g, or t
  misc_feature (1118)..(1118): n is a, c, g, or t
  misc_feature (1131)..(1132): n is a, c, g, or t
  misc_feature (1167)..(1167): n is a, c, g, or t
  misc_feature (1170)..(1170): n is a, c, g, or t
  misc_feature (1173)..(1173): n is a, c, g, or t
  misc_feature (1184)..(1184): n is a, c, g, or t
  misc_feature (1191)..(1192): n is a, c, g, or t
  misc_feature (1195)..(1195): n is a, c, g, or t
  misc_feature (1197)..(1197): n is a, c, g, or t
  misc_feature (1201)..(1201): n is a, c, g, or t
  misc_feature (1205)..(1207): n is a, c, g, or t
  misc_feature (1209)..(1209): n is a, c, g, or t
  misc_feature (1221)..(1222): n is a, c, g, or t
  misc_feature (1225)..(1225): n is a, c, g, or t
  misc_feature (1229)..(1229): n is a, c, g, or t
  misc_feature (1233)..(1233): n is a, c, g, or t
  misc_feature (1241)..(1241): n is a, c, g, or t
  misc_feature (1249)..(1249): n is a, c, g, or t
  misc_feature (1251)..(1252): n is a, c, g, or t
  misc_feature (1257)..(1257): n is a, c, g, or t
  misc_feature (1262)..(1262): n is a, c, g, or t
  misc_feature (1269)..(1269): n is a, c, g, or t
  misc_feature (1274)..(1274): n is a, c, g, or t
  misc_feature (1277)..(1277): n is a, c, g, or t
  misc_feature (1279)..(1279): n is a, c, g, or t
  misc_feature (1292)..(1295): n is a, c, g, or t
  misc_feature (1299)..(1301): n is a, c, g, or t
  misc_feature (1303)..(1303): n is a, c, g, or t
  misc_feature (1307)..(1308): n is a, c, g, or t
  misc_feature (1312)..(1314): n is a, c, g, or t
  misc_feature (1321)..(1327): n is a, c, g, or t
  misc_feature (1332)..(1333): n is a, c, g, or t
  misc_feature (1342)..(1342): n is a, c, g, or t
  misc_feature (1358)..(1358): n is a, c, g, or t
  misc_feature (1373)..(1374): n is a, c, g, or t
  misc_feature (1378)..(1380): n is a, c, g, or t
  misc_feature (1382)..(1383): n is a, c, g, or t
  misc_feature (1388)..(1388): n is a, c, g, or t
  misc_feature (1400)..(1400): n is a, c, g, or t
nntagagagaattaactatgagaggatcgcatcaccattcaccatcacggatcctatttaggtgacactatagaatcgtcgacccacgcgtccgcggctgcctcctcccaacaggccggcctcggccgcgctggcgactcggcggtgctggtgctgccgccttccccgggccctcgttcctccaggcccagcatggactcggaagggggaagcctcctcctggacgaggactcggaagtcttcaagatgctgcaggaaaatcgcgagggacgggcggccccccgacagtccagctcctttcggctcttgcaggaagccctggaggctgaggagagaggtggcacgccagccttcttgcccagctcactgagcccccagtcctccctgcccgcctccagggccctggccacccctcccaagctccacacttgtgagaagtgcagtaccagcatcgcgaaccaggctgtgcgcatccaggagggccggtaccgccaccccggctgctacacctgtgccgactgtgggctgaacctgaagatgcgcgggcacttctgggtgggtgacgagctgtactgtgagaagcatgcccgccagcgctactccgcacctgccaccctcagctctcgggcctgagcccgccatgccctcagcctgcctcactgctgggccagggtcatgcctatataagttggcatggcagggacaatggtgggcagttgctcttacatgagctaagtttggagacctgaggcccctttgtcctcgctgggtgggccaaggtctgggacctgtcttggactgtgggagactcaccctcaccttgccaggcctctcccctgcangactggcattgcactantctgaggtggccactgncctttgatcaacntttgtgtgcgaaggtctaantanggtcnaacanaaaantgggaaagaaaaggggtggggccaaggggctaatggtgtcactntgtaaaantttttnanataactaacnctataaananntgaatatgggccaaattaaanaaanaaanannaannnnannnannnnnnggggngncccccncctnaaaggaagncnnaataaacntaatnactnaacttgnaactcctnttgaaaaatccannaatgaactcaaaactccctctggatttttaaaaanccncgnttggcccgggngtttttnntgngnaaancaannnantgggaaattttnnggnttangaanttaaatgnaaaaaaancnngatanccccngtttatntccanggncncaaaaaattttannnntttnnntnttcnnggannnaaaaaannnnnnnaatanncttttaaanaaaaaaaaaaattttncctttttttttcccnnaaannncnnatttnaaaaaagggggn

SEQ ID NO: 903 - DNA, 1328 bp, Homo Sapiens
  misc_feature (1)..(1): n is a, c, g, or t
  misc_feature (913)..(913): n is a, c, g, or t
  misc_feature (932)..(932): n is a, c, g, or t
  misc_feature (943)..(943): n is a, c, g, or t
  misc_feature (961)..(961): n is a, c, g, or t
  misc_feature (964)..(964): n is a, c, g, or t
  misc_feature (968)..(968): n is a, c, g, or t
  misc_feature (971)..(971): n is a, c, g, or t
  misc_feature (998)..(998): n is a, c, g, or t
  misc_feature (1008)..(1009): n is a, c, g, or t
  misc_feature (1033)..(1033): n is a, c, g, or t
  misc_feature (1040)..(1040): n is a, c, g, or t
  misc_feature (1042)..(1042): n is a, c, g, or t
  misc_feature (1052)..(1052): n is a, c, g, or t
  misc_feature (1059)..(1059): n is a, c, g, or t
  misc_feature (1066)..(1066): n is a, c, g, or t
  misc_feature (1081)..(1085): n is a, c, g, or t
  misc_feature (1089)..(1089): n is a, c, g, or t
  misc_feature (1095)..(1095): n is a, c, g, or t
  misc_feature (1099)..(1100): n is a, c, g, or t
  misc_feature (1104)..(1104): n is a, c, g, or t
  misc_feature (1108)..(1108): n is a, c, g, or t
  misc_feature (1111)..(1111): n is a, c, g, or t
  misc_feature (1113)..(1114): n is a, c, g, or t
  misc_feature (1121)..(1121): n is a, c, g, or t
  misc_feature (1126)..(1126): n is a, c, g, or t
  misc_feature (1134)..(1135): n is a, c, g, or t
  misc_feature (1148)..(1148): n is a, c, g, or t
  misc_feature (1150)..(1150): n is a, c, g, or t
  misc_feature (1162)..(1164): n is a, c, g, or t
  misc_feature (1170)..(1170): n is a, c, g, or t
  misc_feature (1176)..(1177): n is a, c, g, or t
  misc_feature (1179)..(1179): n is a, c, g, or t
  misc_feature (1182)..(1182): n is a, c, g, or t
  misc_feature (1190)..(1190): n is a, c, g, or t
  misc_feature (1200)..(1200): n is a, c, g, or t
  misc_feature (1208)..(1208): n is a, c, g, or t
  misc_feature (1212)..(1212): n is a, c, g, or t
  misc_feature (1214)..(1214): n is a, c, g, or t
  misc_feature (1217)..(1217): n is a, c, g, or t
  misc_feature (1219)..(1219): n is a, c, g, or t
  misc_feature (1235)..(1236): n is a, c, g, or t
  misc_feature (1240)..(1241): n is a, c, g, or t
  misc_feature (1247)..(1248): n is a, c, g, or t
  misc_feature (1253)..(1254): n is a, c, g, or t
  misc_feature (1265)..(1265): n is a, c, g, or t
  misc_feature (1268)..(1268): n is a, c, g, or t
  misc_feature (1271)..(1271): n is a, c, g, or t
  misc_feature (1274)..(1277): n is a, c, g, or t
  misc_feature (1279)..(1280): n is a, c, g, or t
  misc_feature (1288)..(1289): n is a, c, g, or t
  misc_feature (1292)..(1293): n is a, c, g, or t
  misc_feature (1297)..(1297): n is a, c, g, or t
  misc_feature (1299)..(1299): n is a, c, g, or t
  misc_feature (1303)..(1303): n is a, c, g, or t
  misc_feature (1308)..(1310): n is a, c, g, or t
  misc_feature (1312)..(1312): n is a, c, g, or t
  misc_feature (1315)..(1315): n is a, c, g, or t
  misc_feature (1328)..(1328): n is a, c, g, or t
naattagagaaattactatggagaggatcgcatcaccattcaccatcacggatcctatttaggtgacactatagaatcgtcgacccacgcgtccgcccaaccctcctccattccatccccagagctgccccagaagaatcagcgcctggagaaatataaagatgtgattggctgcctgccgcgggtcaaccgccgcacactggccaccctcattgggcatctctatcgggtgcagaaatgtgcggctctaaaccagatgtgcacgcggaacttggctctgctgtttgcacccagcgtgttccagacggatgggcgaggggagcacgaggtgcgagtgctgcaagagctcattgatggctacatctctgtctttgatatcgattctgaccaggtagctcagattgacttggaggtcagtcttatcaccacctggaaggacgtgcagctgtctcaggctggagacctcatcatggaagtttatatagagcagcagctcccagacaactgtgtcaccctgaaggtgtccccaaccctgactgctgaggagctgactaaccaggtactggagatgcgggggacagcagctgggatggacttgtgggtgacttttgagattcgcgagcatggggagctggagcggccactgcatcccaaggaaaaggtcttagagcaggctttacaatggtgccagctcccagagccctgctcagcttccctgctcttgaaaaaagtccccctggcccaagctggctgcctcttcacaggtatccgacgtgagagcccacgggtggggctgttgcggtgtcgtgaggagccacctcgcttgctgggaagccgcttccaggaaaaggttctttctgctgcgtggccgctgcctgctgctgctcaaggaaaaaaaaaagctctaaaccanaacgggaatggcctttggnaaggtgccaangtctacctgggaatcccncanaaanttnaaagccccccaacaccgggggggcttncccatttgannctaaaaaaaaaaatgccccttctnacttgtncnggccctgaanaaggatnaaattgngggattggacccccnnnnntccntaaaancccnncccnaagnacnannacccagngggtnttaaaaannccatttcctcccntngaactttgcccnnnaaaaanttgggnncnaangccttttncggcctaccngggggganaaangnggnancccccctccttttttnncaannaaaacnnggggnnaaaaaaaaacnggnaanccnnnncnntttttttnnaannaaancncccnggggnnntnggnaaaaaaaaaaaan

SEQ ID NO: 904 - DNA, 1378 bp, Homo Sapiens
  misc_feature (1)..(1): n is a, c, g, or t
  misc_feature (4)..(4): n is a, c, g, or t
  misc_feature (762)..(762): n is a, c, g, or t
  misc_feature (855)..(855): n is a, c, g, or t
  misc_feature (881)..(881): n is a, c, g, or t
  misc_feature (947)..(948): n is a, c, g, or t
  misc_feature (950)..(951): n is a, c, g, or t
  misc_feature (955)..(971): n is a, c, g, or t
  misc_feature (984)..(984): n is a, c, g, or t
  misc_feature (993)..(993): n is a, c, g, or t
  misc_feature (995)..(995): n is a, c, g, or t
  misc_feature (998)..(999): n is a, c, g, or t
  misc_feature (1015)..(1015): n is a, c, g, or t
  misc_feature (1018)..(1018): n is a, c, g, or t
  misc_feature (1020)..(1020): n is a, c, g, or t
  misc_feature (1022)..(1022): n is a, c, g, or t
  misc_feature (1033)..(1033): n is a, c, g, or t
  misc_feature (1052)..(1052): n is a, c, g, or t
  misc_feature (1056)..(1056): n is a, c, g, or t
  misc_feature (1072)..(1072): n is a, c, g, or t
  misc_feature (1076)..(1079): n is a, c, g, or t
  misc_feature (1086)..(1086): n is a, c, g, or t
  misc_feature (1103)..(1103): n is a, c, g, or t
  misc_feature (1107)..(1107): n is a, c, g, or t
  misc_feature (1127)..(1127): n is a, c, g, or t
  misc_feature (1148)..(1148): n is a, c, g, or t
  misc_feature (1151)..(1151): n is a, c, g, or t
  misc_feature (1159)..(1159): n is a, c, g, or t
  misc_feature (1161)..(1161): n is a, c, g, or t
  misc_feature (1168)..(1168): n is a, c, g, or t
  misc_feature (1173)..(1173): n is a, c, g, or t
  misc_feature (1175)..(1175): n is a, c, g, or t
  misc_feature (1180)..(1180): n is a, c, g, or t
  misc_feature (1182)..(1182): n is a, c, g, or t
  misc_feature (1186)..(1186): n is a, c, g, or t
  misc_feature (1193)..(1193): n is a, c, g, or t
  misc_feature (1204)..(1204): n is a, c, g, or t
  misc_feature (1209)..(1209): n is a, c, g, or t
  misc_feature (1211)..(1211): n is a, c, g, or t
  misc_feature (1213)..(1213): n is a, c, g, or t
  misc_feature (1217)..(1217): n is a, c, g, or t
  misc_feature (1224)..(1224): n is a, c, g, or t
  misc_feature (1230)..(1230): n is a, c, g, or t
  misc_feature (1233)..(1233): n is a, c, g, or t
  misc_feature (1239)..(1239): n is a, c, g, or t
  misc_feature (1241)..(1241): n is a, c, g, or t
  misc_feature (1256)..(1256): n is a, c, g, or t
  misc_feature (1262)..(1262): n is a, c, g, or t
  misc_feature (1268)..(1269): n is a, c, g, or t
  misc_feature (1272)..(1273): n is a, c, g, or t
  misc_feature (1276)..(1278): n is a, c, g, or t
  misc_feature (1282)..(1283): n is a, c, g, or t
  misc_feature (1286)..(1288): n is a, c, g, or t
  misc_feature (1296)..(1296): n is a, c, g, or t
  misc_feature (1298)..(1298): n is a, c, g, or t
  misc_feature (1302)..(1302): n is a, c, g, or t
  misc_feature (1305)..(1305): n is a, c, g, or t
  misc_feature (1307)..(1308): n is a, c, g, or t
  misc_feature (1312)..(1312): n is a, c, g, or t
  misc_feature (1323)..(1323): n is a, c, g, or t
  misc_feature (1326)..(1326): n is a, c, g, or t
  misc_feature (1353)..(1354): n is a, c, g, or t
  misc_feature (1357)..(1358): n is a, c, g, or t
  misc_feature (1366)..(1366): n is a, c, g, or t
  misc_feature (1376)..(1376): n is a, c, g, or t
naantagagaaattactatgagaggatcgcatcaccatcaccatcacggatcctatttaggtgacactatagaatcgtcgacccacgcgtccggtgagatccgcgcgggtgctagctagtcctttctcgtcgctgctcggctcgcggcccgtggggtcggccccgccaccgttgccgccatgcccatgaagggccgcttccccatccgccgcaccctgcaatatctgagccaggggaacgtggtgttcaaggactccgtgaaggtcatgacagtgaattacaacacgcatggggagctgggcgagggcgccaggaagtttgtgtttttcaacatacctcagattcaatacaaaaacccttgggtgcagatcatgatgtttaagaacatgacgccgtcacccttcctgcgattctacttagattctggggagcaggtcctggtggatgtggagaccaagagcaataaggagatcatggagcacatcagaaaaatcttggggaagaatgaggaaaccctcagggaagaggaggaggagaaaaagcagctttctcacccagccaacttcggccctcgaaagtactgcctgcgggagtgcatctgtgaagtggaagggcaggtgccctgccccagcctggtgccattacccaaggagatgagggggaagtacaaagccgctctgaaagccgatgcccaggactaaggcccacggtcactgtgggctggggtgatggtgtctgaccagtggggagattggaatgggnattactttggcccagggaagcccctggttctgtccctggagactctggaaaatcctttttgcattaaaaggactttacacacctgtgtaaaangatgtgggaaaaggagggtctgaaanctgaactgctaaatgaatatcccctgctctgctggtcaaataaaaccccttcctaattagccaaannannaaannnnnnnnnnnnnnnnnaagggcggccccncccctaaangngannccgtattaaaccttanttnancngaaccttgaancccttttgaaaaaatccantaantgaccccccaaaaccncctnnnngaatttntttcaaaaaacctcggnttgnccccccgggggttttttttnttggggaaaaaatccaaaccntantttggggnanaattttnggggncntaggnancttnaaattgngaaaaaaaacnctggnanancccnccttttnaaattnccnaagggntncttaaaaaaaatttntagggnttttcnnccnnttnnncagnnacnnnaaacaaancnttcncgngnnattnagccctttttnaancccaaaaaaaaaaaccccattttttcnngcnntttttttnttttcccccnaa

SEQ ID NO: 905 - DNA, 830 bp, Homo Sapiens
  misc_feature (665)..(665): n is a, c, g, or t
  misc_feature (692)..(692): n is a, c, g, or t
  misc_feature (713)..(713): n is a, c, g, or t
  misc_feature (725)..(725): n is a, c, g, or t
  misc_feature (728)..(728): n is a, c, g, or t
  misc_feature (742)..(742): n is a, c, g, or t
  misc_feature (745)..(745): n is a, c, g, or t
  misc_feature (767)..(767): n is a, c, g, or t
  misc_feature (775)..(775): n is a, c, g, or t
  misc_feature (780)..(780): n is a, c, g, or t
  misc_feature (784)..(785): n is a, c, g, or t
  misc_feature (787)..(830): n is a, c, g, or t
tagagaaattactatgagaggatcgcatcaccatcaccatcacggatcctatttaggtgacactatagaatcgtcgacccacgcgtccgatgagtttgcagccaaggctacagaggatcaaatgcggctcctacggctgcagcggcgcctagaagacgagctggggggccagttcctagacctgtctctacatgacacagttaccaccctcattcttggcggtcacaacaagcgtgcagagcagctggcacgtgacttccgcatccctgacaagaggctctggtggctgaagctgactgccctggcagatttggaagattgggaagagctagagaagttttccaagagcaagaaatcacccattggctacctgccttttgtggagatctgcatgaaacaacataacaaatacgaagccaagaagtatgcttcccgcgtgggtcccgagcagaaggtcaaggctttgcttcttgttggcgatgtggctcaggctgcagatgtggccatcgaacaccggaatgaggctgagctgagcctcgtattgtcccactgcacgggagccacagatggggccacagctgacaagattcaacgggccagggcacaagcccagaagaagtgaggagtccatcctgtacatctcaagcaaggggttcctcccctancacctgggcttggcagaagggccatanttcatccagctcctcccctanagcaatgctgangancgggggcatggtancanggctgtctggttttaaataaanttggaacncttcnaaannannnnnnnnnnnnnnnnnnnnnnnnnnnnnnnnnnnnnnnnnnnn

SEQ ID NO: 906 - DNA, 1200 bp, Homo Sapiens
  misc_feature (2)..(2): n is a, c, g, or t
  misc_feature (11)..(11): n is a, c, g, or t
  misc_feature (889)..(889): n is a, c, g, or t
  misc_feature (916)..(916): n is a, c, g, or t
  misc_feature (953)..(953): n is a, c, g, or t
  misc_feature (959)..(959): n is a, c, g, or t
  misc_feature (963)..(963): n is a, c, g, or t
  misc_feature (995)..(995): n is a, c, g, or t
  misc_feature (1027)..(1027): n is a, c, g, or t
  misc_feature (1039)..(1039): n is a, c, g, or t
  misc_feature (1058)..(1058): n is a, c, g, or t
  misc_feature (1071)..(1071): n is a, c, g, or t
  misc_feature (1080)..(1080): n is a, c, g, or t
  misc_feature (1098)..(1098): n is a, c, g, or t
  misc_feature (1101)..(1101): n is a, c, g, or t
  misc_feature (1103)..(1103): n is a, c, g, or t
  misc_feature (1106)..(1106): n is a, c, g, or t
  misc_feature (1127)..(1127): n is a, c, g, or t
  misc_feature (1142)..(1142): n is a, c, g, or t
  misc_feature (1145)..(1145): n is a, c, g, or t
  misc_feature (1156)..(1156): n is a, c, g, or t
  misc_feature (1158)..(1158): n is a, c, g, or t
  misc_feature (1161)..(1161): n is a, c, g, or t
  misc_feature (1168)..(1168): n is a, c, g, or t
  misc_feature (1178)..(1178): n is a, c, g, or t
  misc_feature (1180)..(1180): n is a, c, g, or t
  misc_feature (1184)..(1185): n is a, c, g, or t
  misc_feature (1198)..(1198): n is a, c, g, or t
anattagaganattactatgagaggatcgcatcaccatcaccatcacggatcctatttaggtgacactatagaatcgtcgacccacgcgtccgcccacgcgtccggatgcggtgtgggacgcgcgggaacagcagcagcagatcctgcagatggccatcgtggaacacctgtatcagcagggcatgctcagcgtggccgaggagctgtgccaggaatcaacgctgaatgtggacttggatttcaagcagcctttcctagagttgaatcgaatcctggaagccctgcacgaacaagacctgggtcctgcgttggaatgggccgtctcccacaggcagcgcctgctggaactcaacagctccctggagttcaagctgcaccgactgcacttcatccgcctcttggcaggaggccccgcgaagcagctggaggccctcagctatgctcggcacttccagccctttgctcggctgcaccagcgggagatccaggtgatgatgggcagcctggtgtacctgcggctgggcttggagaagtcaccctactgccacctgctggacagcagccactgggcagagatctgtgagacctttacccgggacgcctgttccctgctggggctttctgtggagtccccccttagcgtcagctttgcctctggctgtgtggcgctgcctgtgttgatgaacatcaaggctgtgattgagcagcggcagtgcactggggtctggaatcacaaggacgagttaccgattgagattgaactaggcatgaagtgctggtaccactccgtgttcgcttgccccatcctccgccagcagacgtcaaaattccaaccctcccatcaagctcatctgtggccatgttatctcccgagatgcactcaataanctcattaatggaaggaaaagctgaagngtccctaactgttcccatggaaccaaaaccccggcanatgggnaaancgcatccatattctgattccttacctggaaangaattttttttgaaagggggtttttcccctgntgaacccttggntctggtctccggtaagggnggtcaactttcantggaattgnggttggttttcaaaaacnccntnggnttaaagaattttcccctgaangggaaacactggaanccncccccttttgncnaangcttaanaagggaaaangnaacnncccccccccctgnga

SEQ ID NO: 907 - DNA, 1453 bp, Homo Sapiens
  misc_feature (1)..(1): n is a, c, g, or t
  misc_feature (6)..(6): n is a, c, g, or t
  misc_feature (18)..(19): n is a, c, g, or t
  misc_feature (21)..(21): n is a, c, g, or t
  misc_feature (73)..(73): n is a, c, g, or t
  misc_feature (79)..(79): n is a, c, g, or t
  misc_feature (93)..(93): n is a, c, g, or t
  misc_feature (101)..(101): n is a, c, g, or t
  misc_feature (711)..(711): n is a, c, g, or t
  misc_feature (729)..(729): n is a, c, g, or t
  misc_feature (785)..(785): n is a, c, g, or t
  misc_feature (788)..(788): n is a, c, g, or t
  misc_feature (840)..(840): n is a, c, g, or t
  misc_feature (849)..(849): n is a, c, g, or t
  misc_feature (857)..(857): n is a, c, g, or t
  misc_feature (869)..(869): n is a, c, g, or t
  misc_feature (937)..(937): n is a, c, g, or t
  misc_feature (941)..(941): n is a, c, g, or t
  misc_feature (950)..(950): n is a, c, g, or t
  misc_feature (956)..(956): n is a, c, g, or t
  misc_feature (964)..(964): n is a, c, g, or t
  misc_feature (976)..(976): n is a, c, g, or t
  misc_feature (979)..(979): n is a, c, g, or t
  misc_feature (981)..(982): n is a, c, g, or t
  misc_feature (985)..(985): n is a, c, g, or t
  misc_feature (994)..(994): n is a, c, g, or t
  misc_feature (1005)..(1005): n is a, c, g, or t
  misc_feature (1016)..(1016): n is a, c, g, or t
  misc_feature (1029)..(1029): n is a, c, g, or t
  misc_feature (1047)..(1047): n is a, c, g, or t
  misc_feature (1049)..(1049): n is a, c, g, or t
  misc_feature (1058)..(1058): n is a, c, g, or t
  misc_feature (1063)..(1063): n is a, c, g, or t
  misc_feature (1069)..(1069): n is a, c, g, or t
  misc_feature (1074)..(1074): n is a, c, g, or t
  misc_feature (1097)..(1097): n is a, c, g, or t
  misc_feature (1101)..(1101): n is a, c, g, or t
  misc_feature (1111)..(1111): n is a, c, g, or t
  misc_feature (1135)..(1135): n is a, c, g, or t
  misc_feature (1140)..(1140): n is a, c, g, or t
  misc_feature (1151)..(1151): n is a, c, g, or t
  misc_feature (1157)..(1157): n is a, c, g, or t
  misc_feature (1161)..(1162): n is a, c, g, or t
  misc_feature (1174)..(1174): n is a, c, g, or t
  misc_feature (1178)..(1179): n is a, c, g, or t
  misc_feature (1182)..(1182): n is a, c, g, or t
  misc_feature (1185)..(1185): n is a, c, g, or t
  misc_feature (1189)..(1189): n is a, c, g, or t
  misc_feature (1194)..(1194): n is a, c, g, or t
  misc_feature (1198)..(1198): n is a, c, g, or t
  misc_feature (1200)..(1203): n is a, c, g, or t
  misc_feature (1207)..(1207): n is a, c, g, or t
  misc_feature (1217)..(1217): n is a, c, g, or t
  misc_feature (1227)..(1227): n is a, c, g, or t
  misc_feature (1238)..(1239): n is a, c, g, or t
  misc_feature (1241)..(1241): n is a, c, g, or t
  misc_feature (1243)..(1243): n is a, c, g, or t
  misc_feature (1245)..(1245): n is a, c, g, or t
  misc_feature (1248)..(1248): n is a, c, g, or t
  misc_feature (1251)..(1251): n is a, c, g, or t
  misc_feature (1256)..(1257): n is a, c, g, or t
  misc_feature (1264)..(1264): n is a, c, g, or t
  misc_feature (1277)..(1278): n is a, c, g, or t
  misc_feature (1281)..(1281): n is a, c, g, or t
  misc_feature (1286)..(1286): n is a, c, g, or t
  misc_feature (1289)..(1289): n is a, c, g, or t
  misc_feature (1297)..(1298): n is a, c, g, or t
  misc_feature (1301)..(1302): n is a, c, g, or t
  misc_feature (1306)..(1306): n is a, c, g, or t
  misc_feature (1312)..(1312): n is a, c, g, or t
  misc_feature (1317)..(1317): n is a, c, g, or t
  misc_feature (1320)..(1320): n is a, c, g, or t
  misc_feature (1336)..(1336): n is a, c, g, or t
  misc_feature (1349)..(1352): n is a, c, g, or t
  misc_feature (1355)..(1355): n is a, c, g, or t
  misc_feature (1368)..(1368): n is a, c, g, or t
  misc_feature (1376)..(1376): n is a, c, g, or t
  misc_feature (1379)..(1379): n is a, c, g, or t
  misc_feature (1383)..(1385): n is a, c, g, or t
  misc_feature (1394)..(1394): n is a, c, g, or t
  misc_feature (1398)..(1398): n is a, c, g, or t
  misc_feature (1406)..(1406): n is a, c, g, or t
  misc_feature (1415)..(1416): n is a, c, g, or t
  misc_feature (1420)..(1420): n is a, c, g, or t
  misc_feature (1431)..(1432): n is a, c, g, or t
  misc_feature (1439)..(1439): n is a, c, g, or t
  misc_feature (1443)..(1444): n is a, c, g, or t
  misc_feature (1447)..(1447): n is a, c, g, or t
  misc_feature (1452)..(1452): n is a, c, g, or t
naattngagaaaattacnntnagagggatgcataccatcaccatcacggatcctatttaggtgacactatagnaatcgntcgacccacgccgntccggcgntaagcaagggggacaagccggtgacctacgaggaggcacacgcgccgcactacatcgcccaccgtaaaggctggctgtcgctgcacacaggtaacctggatggagaggaccatgccgcagagcgaacggtggaggatgttttccttcgcaagttcatgtggggtaccttcccaggctgcctggctgaccagctggttttaaagcgccggggtaaccagttggagatctgtgccgtggtcctgaggcagttgtctccacacaagtactacttcctcgtgggctacagtgaaactttgctgtcctacttttacaaatgtcctgtgcgactccacctccaaactgtgccctcaaaggttgtgtataagtacctctagaacaatccccttttttccatcaagctgtagcctgcagagaatggaaacgtgggaaaggaatggtatgtgggggaaatgcatcccctcagaggactgaggcatagtctctcatctgctattgaataaagaccttctatcttgaaaaaaaaaaaaaaaaaaaaaaaaaaaaggggcggccgctccctatagtgagtcgtattaagcttaattagctgagcttggactcctgttgatanatccagtaatgacctcanaactccatctggatttgttcaaaacgctcggttgccgccgggcgttttttattggnganaatccaagctagcttggcgagattttcaggagctaaggaagctaaaatgganaaaaaatcnctggatanaccaccgttganatatcccaatggcatcgtaaaaaaacattttgaggcatttcagtcagttgctcaatggtacctataanccanaccgttcanctgganattacggnccttttttaaanacngnnaanaaaaataancccaagttttnatccggccttnattcccattcttngcccccctgaagaatgcncnctcccgaantttcntaatgncattnaaaaaacgggaaacctggggaantggnaaaatgttcnccccttgttaccccggttttccangaacnaatttaaaacntttttncccnncttgaaaggaanaccnnaanaanttcnggcgntttntnnnnatanttcccaaaantgggggggtnaagggaaaacnngncnanttnccnaaagnntttttgnaaaatttttttcnnccncccanccnggggaatnnccnntttntttaangggcnaangaaaaattttcccccnttttccggggaannnnacnggaaagggggaanccggaatnagnttcnnncctttgagntccnccccaaanttaaaaaannccgnagggggggggnnttttaanttgnnccncccgna

SEQ ID NO: 908 - DNA, 1797 bp, Homo Sapiens
  misc_feature (4)..(4): n is a, c, g, or t
  misc_feature (8)..(8): n is a, c, g, or t
  misc_feature (12)..(12): n is a, c, g, or t
  misc_feature (21)..(21): n is a, c, g, or t
  misc_feature (28)..(28): n is a, c, g, or t
  misc_feature (31)..(32): n is a, c, g, or t
  misc_feature (41)..(41): n is a, c, g, or t
  misc_feature (45)..(45): n is a, c, g, or t
  misc_feature (53)..(53): n is a, c, g, or t
  misc_feature (56)..(56): n is a, c, g, or t
  misc_feature (59)..(59): n is a, c, g, or t
  misc_feature (63)..(64): n is a, c, g, or t
  misc_feature (68)..(68): n is a, c, g, or t
  misc_feature (73)..(73): n is a, c, g, or t
  misc_feature (79)..(79): n is a, c, g, or t
  misc_feature (82)..(82): n is a, c, g, or t
  misc_feature (88)..(89): n is a, c, g, or t
  misc_feature (95)..(95): n is a, c, g, or t
  misc_feature (105)..(105): n is a, c, g, or t
  misc_feature (111)..(111): n is a, c, g, or t
  misc_feature (117)..(118): n is a, c, g, or t
  misc_feature (134)..(135): n is a, c, g, or t
  misc_feature (137)..(137): n is a, c, g, or t
  misc_feature (140)..(140): n is a, c, g, or t
  misc_feature (148)..(148): n is a, c, g, or t
  misc_feature (153)..(156): n is a, c, g, or t
  misc_feature (158)..(159): n is a, c, g, or t
  misc_feature (164)..(164): n is a, c, g, or t
  misc_feature (168)..(168): n is a, c, g, or t
  misc_feature (172)..(172): n is a, c, g, or t
  misc_feature (176)..(176): n is a, c, g, or t
  misc_feature (180)..(182): n is a, c, g, or t
  misc_feature (186)..(186): n is a, c, g, or t
  misc_feature (195)..(195): n is a, c, g, or t
  misc_feature (199)..(201): n is a, c, g, or t
  misc_feature (204)..(204): n is a, c, g, or t
  misc_feature (212)..(212): n is a, c, g, or t
  misc_feature (214)..(214): n is a, c, g, or t
  misc_feature (216)..(218): n is a, c, g, or t
  misc_feature (220)..(221): n is a, c, g, or t
  misc_feature (223)..(223): n is a, c, g, or t
  misc_feature (225)..(226): n is a, c, g, or t
  misc_feature (230)..(231): n is a, c, g, or t
  misc_feature (235)..(235): n is a, c, g, or t
  misc_feature (237)..(237): n is a, c, g, or t
  misc_feature (240)..(243): n is a, c, g, or t
  misc_feature (245)..(245): n is a, c, g, or t
  misc_feature (249)..(250): n is a, c, g, or t
  misc_feature (255)..(256): n is a, c, g, or t
  misc_feature (261)..(261): n is a, c, g, or t
  misc_feature (264)..(264): n is a, c, g, or t
  misc_feature (272)..(272): n is a, c, g, or t
  misc_feature (284)..(284): n is a, c, g, or t
  misc_feature (287)..(287): n is a, c, g, or t
  misc_feature (292)..(292): n is a, c, g, or t
  misc_feature (294)..(294): n is a, c, g, or t
  misc_feature (297)..(297): n is a, c, g, or t
  misc_feature (299)..(299): n is a, c, g, or t
  misc_feature (304)..(304): n is a, c, g, or t
  misc_feature (308)..(309): n is a, c, g, or t
  misc_feature (311)..(311): n is a, c, g, or t
  misc_feature (313)..(314): n is a, c, g, or t
  misc_feature (316)..(316): n is a, c, g, or t
  misc_feature (320)..(322): n is a, c, g, or t
  misc_feature (324)..(324): n is a, c, g, or t
  misc_feature (329)..(329): n is a, c, g, or t
  misc_feature (335)..(335): n is a, c, g, or t
  misc_feature (339)..(340): n is a, c, g, or t
  misc_feature (342)..(342): n is a, c, g, or t
  misc_feature (346)..(346): n is a, c, g, or t
  misc_feature (348)..(348): n is a, c, g, or t
  misc_feature (351)..(353): n is a, c, g, or t
  misc_feature (358)..(358): n is a, c, g, or t
  misc_feature (360)..(360): n is a, c, g, or t
  misc_feature (365)..(365): n is a, c, g, or t
  misc_feature (367)..(368): n is a, c, g, or t
  misc_feature (370)..(370): n is a, c, g, or t
  misc_feature (372)..(372): n is a, c, g, or t
  misc_feature (374)..(374): n is a, c, g, or t
  misc_feature (377)..(377): n is a, c, g, or t
  misc_feature (380)..(380): n is a, c, g, or t
  misc_feature (385)..(386): n is a, c, g, or t
  misc_feature (388)..(388): n is a, c, g, or t
  misc_feature (390)..(390): n is a, c, g, or t
  misc_feature (393)..(393): n is a, c, g, or t
  misc_feature (396)..(396): n is a, c, g, or t
  misc_feature (400)..(400): n is a, c, g, or t
  misc_feature (404)..(406): n is a, c, g, or t
  misc_feature (408)..(408): n is a, c, g, or t
  misc_feature (410)..(410): n is a, c, g, or t
  misc_feature (412)..(412): n is a, c, g, or t
  misc_feature (414)..(415): n is a, c, g, or t
  misc_feature (419)..(419): n is a, c, g, or t
  misc_feature (423)..(423): n is a, c, g, or t
  misc_feature (425)..(425): n is a, c, g, or t
  misc_feature (427)..(427): n is a, c, g, or t
  misc_feature (429)..(429): n is a, c, g, or t
  misc_feature (432)..(432): n is a, c, g, or t
  misc_feature (435)..(435): n is a, c, g, or t
  misc_feature (437)..(438): n is a, c, g, or t
  misc_feature (446)..(446): n is a, c, g, or t
  misc_feature (449)..(449): n is a, c, g, or t
  misc_feature (451)..(452): n is a, c, g, or t
  misc_feature (454)..(454): n is a, c, g, or t
  misc_feature (456)..(456): n is a, c, g, or t
  misc_feature (467)..(467): n is a, c, g, or t
  misc_feature (470)..(472): n is a, c, g, or t
  misc_feature (478)..(478): n is a, c, g, or t
  misc_feature (491)..(491): n is a, c, g, or t
  misc_feature (494)..(494): n is a, c, g, or t
  misc_feature (498)..(498): n is a, c, g, or t
  misc_feature (500)..(500): n is a, c, g, or t
  misc_feature (502)..(502): n is a, c, g, or t
  misc_feature (504)..(507): n is a, c, g, or t
  misc_feature (509)..(509): n is a, c, g, or t
  misc_feature (511)..(511): n is a, c, g, or t
  misc_feature (516)..(516): n is a, c, g, or t
  misc_feature (520)..(521): n is a, c, g, or t
  misc_feature (523)..(523): n is a, c, g, or t
  misc_feature (526)..(526): n is a, c, g, or t
  misc_feature (531)..(531): n is a, c, g, or t
  misc_feature (534)..(534): n is a, c, g, or t
  misc_feature (539)..(539): n is a, c, g, or t
  misc_feature (543)..(543): n is a, c, g, or t
  misc_feature (547)..(548): n is a, c, g, or t
  misc_feature (556)..(556): n is a, c, g, or t
  misc_feature (563)..(563): n is a, c, g, or t
  misc_feature (565)..(566): n is a, c, g, or t
  misc_feature (574)..(574): n is a, c, g, or t
  misc_feature (579)..(580): n is a, c, g, or t
  misc_feature (583)..(583): n is a, c, g, or t
  misc_feature (585)..(585): n is a, c, g, or t
  misc_feature (587)..(587): n is a, c, g, or t
  misc_feature (592)..(592): n is a, c, g, or t
  misc_feature (595)..(595): n is a, c, g, or t
  misc_feature (597)..(598): n is a, c, g, or t
  misc_feature (603)..(603): n is a, c, g, or t
  misc_feature (605)..(606): n is a, c, g, or t
  misc_feature (611)..(611): n is a, c, g, or t
  misc_feature (614)..(614): n is a, c, g, or t
  misc_feature (618)..(618): n is a, c, g, or t
  misc_feature (622)..(622): n is a, c, g, or t
  misc_feature (624)..(628): n is a, c, g, or t
  misc_feature (633)..(633): n is a, c, g, or t
  misc_feature (636)..(636): n is a, c, g, or t
  misc_feature (639)..(639): n is a, c, g, or t
  misc_feature (643)..(643): n is a, c, g, or t
  misc_feature (645)..(645): n is a, c, g, or t
  misc_feature (650)..(651): n is a, c, g, or t
  misc_feature (656)..(656): n is a, c, g, or t
  misc_feature (659)..(660): n is a, c, g, or t
  misc_feature (665)..(665): n is a, c, g, or t
  misc_feature (667)..(667): n is a, c, g, or t
  misc_feature (672)..(675): n is a, c, g, or t
  misc_feature (677)..(677): n is a, c, g, or t
  misc_feature (680)..(680): n is a, c, g, or t
  misc_feature (683)..(684): n is a, c, g, or t
  misc_feature (688)..(690): n is a, c, g, or t
  misc_feature (693)..(693): n is a, c, g, or t
  misc_feature (695)..(695): n is a, c, g, or t
  misc_feature (697)..(697): n is a, c, g, or t
  misc_feature (699)..(700): n is a, c, g, or t
  misc_feature (702)..(702): n is a, c, g, or t
  misc_feature (707)..(708): n is a, c, g, or t
  misc_feature (714)..(714): n is a, c, g, or t
  misc_feature (718)..(718): n is a, c, g, or t
  misc_feature (722)..(724): n is a, c, g, or t
  misc_feature (727)..(727): n is a, c, g, or t
  misc_feature (729)..(729): n is a, c, g, or t
  misc_feature (735)..(736): n is a, c, g, or t
  misc_feature (743)..(743): n is a, c, g, or t
  misc_feature (750)..(750): n is a, c, g, or t
  misc_feature (753)..(753): n is a, c, g, or t
  misc_feature (755)..(756): n is a, c, g, or t
  misc_feature (759)..(759): n is a, c, g, or t
  misc_feature (762)..(765): n is a, c, g, or t
  misc_feature (768)..(768): n is a, c, g, or t
  misc_feature (778)..(779): n is a, c, g, or t
  misc_feature (784)..(784): n is a, c, g, or t
  misc_feature (788)..(789): n is a, c, g, or t
  misc_feature (795)..(795): n is a, c, g, or t
  misc_feature (798)..(798): n is a, c, g, or t
  misc_feature (801)..(802): n is a, c, g, or t
  misc_feature (807)..(807): n is a, c, g, or t
  misc_feature (809)..(810): n is a, c, g, or t
  misc_feature (814)..(819): n is a, c, g, or t
  misc_feature (828)..(829): n is a, c, g, or t
  misc_feature (832)..(832): n is a, c, g, or t
  misc_feature (835)..(835): n is a, c, g, or t
  misc_feature (840)..(840): n is a, c, g, or t
  misc_feature (843)..(843): n is a, c, g, or t
  misc_feature (846)..(848): n is a, c, g, or t
  misc_feature (851)..(852): n is a, c, g, or t
  misc_feature (854)..(855): n is a, c, g, or t
  misc_feature (857)..(859): n is a, c, g, or t
  misc_feature (862)..(862): n is a, c, g, or t
  misc_feature (867)..(867): n is a, c, g, or t
  misc_feature (870)..(870): n is a, c, g, or t
  misc_feature (872)..(872): n is a, c, g, or t
  misc_feature (876)..(876): n is a, c, g, or t
  misc_feature (880)..(880): n is a, c, g, or t
  misc_feature (882)..(882): n is a, c, g, or t
  misc_feature (884)..(884): n is a, c, g, or t
  misc_feature (886)..(886): n is a, c, g, or t
  misc_feature (894)..(894): n is a, c, g, or t
  misc_feature (896)..(896): n is a, c, g, or t
  misc_feature (898)..(902): n is a, c, g, or t
  misc_feature (904)..(905): n is a, c, g, or t
  misc_feature (910)..(910): n is a, c, g, or t
  misc_feature (914)..(917): n is a, c, g, or t
  misc_feature (919)..(921): n is a, c, g, or t
  misc_feature (924)..(924): n is a, c, g, or t
  misc_feature (927)..(929): n is a, c, g, or t
  misc_feature (933)..(933): n is a, c, g, or t
  misc_feature (935)..(935): n is a, c, g, or t
  misc_feature (938)..(938): n is a, c, g, or t
  misc_feature (940)..(941): n is a, c, g, or t
  misc_feature (944)..(944): n is a, c, g, or t
  misc_feature (948)..(948): n is a, c, g, or t
  misc_feature (950)..(950): n is a, c, g, or t
  misc_feature (953)..(953): n is a, c, g, or t
  misc_feature (955)..(955): n is a, c, g, or t
  misc_feature (960)..(960): n is a, c, g, or t
  misc_feature (965)..(965): n is a, c, g, or t
  misc_feature (970)..(970): n is a, c, g, or t
  misc_feature (972)..(972): n is a, c, g, or t
  misc_feature (974)..(975): n is a, c, g, or t
  misc_feature (977)..(978): n is a, c, g, or t
  misc_feature (983)..(983): n is a, c, g, or t
  misc_feature (990)..(990): n is a, c, g, or t
  misc_feature (993)..(993): n is a, c, g, or t
  misc_feature (996)..(996): n is a, c, g, or t
  misc_feature (998)..(1000): n is a, c, g, or t
  misc_feature (1005)..(1009): n is a, c, g, or t
  misc_feature (1022)..(1022): n is a, c, g, or t
  misc_feature (1027)..(1027): n is a, c, g, or t
  misc_feature (1034)..(1035): n is a, c, g, or t
  misc_feature (1038)..(1039): n is a, c, g, or t
  misc_feature (1046)..(1046): n is a, c, g, or t
  misc_feature (1048)..(1048): n is a, c, g, or t
  misc_feature (1050)..(1050): n is a, c, g, or t
  misc_feature (1053)..(1053): n is a, c, g, or t
  misc_feature (1055)..(1057): n is a, c, g, or t
  misc_feature (1059)..(1061): n is a, c, g, or t
  misc_feature (1064)..(1066): n is a, c, g, or t
  misc_feature (1070)..(1071): n is a, c, g, or t
  misc_feature (1075)..(1076): n is a, c, g, or t
  misc_feature (1078)..(1079): n is a, c, g, or t
  misc_feature (1085)..(1085): n is a, c, g, or t
  misc_feature (1089)..(1091): n is a, c, g, or t
  misc_feature (1093)..(1093): n is a, c, g, or t
  misc_feature (1097)..(1097): n is a, c, g, or t
  misc_feature (1102)..(1102): n is a, c, g, or t
  misc_feature (1104)..(1105): n is a, c, g, or t
  misc_feature (1110)..(1110): n is a, c, g, or t
  misc_feature (1116)..(1116): n is a, c, g, or t
  misc_feature (1123)..(1125): n is a, c, g, or t
  misc_feature (1134)..(1134): n is a, c, g, or t
  misc_feature (1138)..(1138): n is a, c, g, or t
  misc_feature (1144)..(1147): n is a, c, g, or t
  misc_feature (1149)..(1151): n is a, c, g, or t
  misc_feature (1154)..(1154): n is a, c, g, or t
  misc_feature (1156)..(1157): n is a, c, g, or t
  misc_feature (1160)..(1160): n is a, c, g, or t
  misc_feature (1162)..(1162): n is a, c, g, or t
  misc_feature (1166)..(1167): n is a, c, g, or t
  misc_feature (1173)..(1175): n is a, c, g, or t
  misc_feature (1177)..(1178): n is a, c, g, or t
  misc_feature (1181)..(1181): n is a, c, g, or t
  misc_feature (1195)..(1198): n is a, c, g, or t
  misc_feature (1200)..(1200): n is a, c, g, or t
  misc_feature (1202)..(1204): n is a, c, g, or t
  misc_feature (1206)..(1208): n is a, c, g, or t
  misc_feature (1221)..(1223): n is a, c, g, or t
  misc_feature (1225)..(1225): n is a, c, g, or t
  misc_feature (1229)..(1231): n is a, c, g, or t
  misc_feature (1234)..(1234): n is a, c, g, or t
  misc_feature (1237)..(1237): n is a, c, g, or t
  misc_feature (1240)..(1240): n is a, c, g, or t
  misc_feature (1242)..(1243): n is a, c, g, or t
  misc_feature (1245)..(1246): n is a, c, g, or t
  misc_feature (1248)..(1248): n is a, c, g, or t
  misc_feature (1250)..(1250): n is a, c, g, or t
  misc_feature (1252)..(1252): n is a, c, g, or t
  misc_feature (1256)..(1259): n is a, c, g, or t
  misc_feature (1267)..(1271): n is a, c, g, or t
  misc_feature (1273)..(1273): n is a, c, g, or t
  misc_feature (1276)..(1276): n is a, c, g, or t
  misc_feature (1279)..(1279): n is a, c, g, or t
  misc_feature (1281)..(1281): n is a, c, g, or t
  misc_feature (1286)..(1286): n is a, c, g, or t
  misc_feature (1290)..(1290): n is a, c, g, or t
  misc_feature (1293)..(1293): n is a, c, g, or t
  misc_feature (1296)..(1296): n is a, c, g, or t
  misc_feature (1300)..(1303): n is a, c, g, or t
  misc_feature (1309)..(1309): n is a, c, g, or t
  misc_feature (1316)..(1316): n is a, c, g, or t
  misc_feature (1320)..(1320): n is a, c, g, or t
  misc_feature (1324)..(1324): n is a, c, g, or t
  misc_feature (1326)..(1326): n is a, c, g, or t
  misc_feature (1332)..(1332): n is a, c, g, or t
  misc_feature (1334)..(1334): n is a, c, g, or t
  misc_feature (1336)..(1336): n is a, c, g, or t
  misc_feature (1339)..(1339): n is a, c, g, or t
  misc_feature (1345)..(1345): n is a, c, g, or t
  misc_feature (1348)..(1350): n is a, c, g, or t
  misc_feature (1352)..(1353): n is a, c, g, or t
  misc_feature (1356)..(1356): n is a, c, g, or t
  misc_feature (1361)..(1361): n is a, c, g, or t
  misc_feature (1363)..(1363): n is a, c, g, or t
  misc_feature (1365)..(1365): n is a, c, g, or t
  misc_feature (1368)..(1368): n is a, c, g, or t
  misc_feature (1375)..(1375): n is a, c, g, or t
  misc_feature (1382)..(1382): n is a, c, g, or t
  misc_feature (1384)..(1385): n is a, c, g, or t
  misc_feature (1387)..(1387): n is a, c, g, or t
  misc_feature (1391)..(1391): n is a, c, g, or t
  misc_feature (1396)..(1396): n is a, c, g, or t
  misc_feature (1398)..(1398): n is a, c, g, or t
  misc_feature (1402)..(1403): n is a, c, g, or t
  misc_feature (1405)..(1405): n is a, c, g, or t
  misc_feature (1409)..(1412): n is a, c, g, or t
  misc_feature (1414)..(1415): n is a, c, g, or t
  misc_feature (1419)..(1419): n is a, c, g, or t
  misc_feature (1422)..(1422): n is a, c, g, or t
  misc_feature (1424)..(1424): n is a, c, g, or t
  misc_feature (1426)..(1426): n is a, c, g, or t
  misc_feature (1428)..(1428): n is a, c, g, or t
  misc_feature (1431)..(1431): n is a, c, g, or t
  misc_feature (1438)..(1438): n is a, c, g, or t
  misc_feature (1442)..(1443): n is a, c, g, or t
  misc_feature (1454)..(1456): n is a, c, g, or t
  misc_feature (1462)..(1462): n is a, c, g, or t
  misc_feature (1468)..(1468): n is a, c, g, or t
  misc_feature (1471)..(1471): n is a, c, g, or t
  misc_feature (1481)..(1481): n is a, c, g, or t
  misc_feature (1484)..(1485): n is a, c, g, or t
  misc_feature (1487)..(1488): n is a, c, g, or t
  misc_feature (1491)..(1491): n is a, c, g, or t
  misc_feature (1493)..(1493): n is a, c, g, or t
  misc_feature (1498)..(1498): n is a, c, g, or t
  misc_feature (1503)..(1503): n is a, c, g, or t
  misc_feature (1512)..(1512): n is a, c, g, or t
  misc_feature (1515)..(1518): n is a, c, g, or t
  misc_feature (1521)..(1521): n is a, c, g, or t
  misc_feature (1523)..(1523): n is a, c, g, or t
  misc_feature (1529)..(1533): n is a, c, g, or t
  misc_feature (1537)..(1537): n is a, c, g, or t
  misc_feature (1540)..(1540): n is a, c, g, or t
  misc_feature (1543)..(1543): n is a, c, g, or t
  misc_feature (1546)..(1548): n is a, c, g, or t
  misc_feature (1555)..(1555): n is a, c, g, or t
  misc_feature (1560)..(1560): n is a, c, g, or t
  misc_feature (1563)..(1563): n is a, c, g, or t
  misc_feature (1565)..(1565): n is a, c, g, or t
  misc_feature (1567)..(1568): n is a, c, g, or t
  misc_feature (1571)..(1571): n is a, c, g, or t
  misc_feature (1574)..(1576): n is a, c, g, or t
  misc_feature (1578)..(1578): n is a, c, g, or t
  misc_feature (1580)..(1580): n is a, c, g, or t
  misc_feature (1584)..(1586): n is a, c, g, or t
  misc_feature (1588)..(1588): n is a, c, g, or t
  misc_feature (1596)..(1598): n is a, c, g, or t
  misc_feature (1600)..(1602): n is a, c, g, or t
  misc_feature (1606)..(1606): n is a, c, g, or t
  misc_feature (1616)..(1617): n is a, c, g, or t
  misc_feature (1619)..(1619): n is a, c, g, or t
  misc_feature (1625)..(1626): n is a, c, g, or t
  misc_feature (1632)..(1632): n is a, c, g, or t
  misc_feature (1638)..(1638): n is a, c, g, or t
  misc_feature (1640)..(1640): n is a, c, g, or t
  misc_feature (1642)..(1644): n is a, c, g, or t
  misc_feature (1649)..(1650): n is a, c, g, or t
  misc_feature (1653)..(1655): n is a, c, g, or t
  misc_feature (1658)..(1658): n is a, c, g, or t
  misc_feature (1662)..(1662): n is a, c, g, or t
  misc_feature (1665)..(1665): n is a, c, g, or t
  misc_feature (1676)..(1676): n is a, c, g, or t
  misc_feature (1684)..(1685): n is a, c, g, or t
  misc_feature (1687)..(1687): n is a, c, g, or t
  misc_feature (1690)..(1690): n is a, c, g, or t
  misc_feature (1693)..(1694): n is a, c, g, or t
  misc_feature (1700)..(1700): n is a, c, g, or t
  misc_feature (1702)..(1702): n is a, c, g, or t
  misc_feature (1717)..(1718): n is a, c, g, or t
  misc_feature (1721)..(1721): n is a, c, g, or t
  misc_feature (1723)..(1723): n is a, c, g, or t
  misc_feature (1727)..(1729): n is a, c, g, or t
  misc_feature (1734)..(1734): n is a, c, g, or t
  misc_feature (1738)..(1738): n is a, c, g, or t
  misc_feature (1740)..(1740): n is a, c, g, or t
  misc_feature (1744)..(1747): n is a, c, g, or t
  misc_feature (1753)..(1753): n is a, c, g, or t
  misc_feature (1755)..(1756): n is a, c, g, or t
  misc_feature (1766)..(1766): n is a, c, g, or t
  misc_feature (1771)..(1773): n is a, c, g, or t
  misc_feature (1781)..(1781): n is a, c, g, or t
  misc_feature (1785)..(1785): n is a, c, g, or t
  misc_feature (1793)..(1793): n is a, c, g, or t
  misc_feature (1795)..(1795): n is a, c, g, or t
aatngganaggnatttcgccnaggcctnggnnggcctgtcncgcncccccctnctnccncggnntctnctttntttgtnggngcgtannataaanatatcacacnccaccncggcgnncgctgcagagcacganngnaangaagagangctcnnnngnnccccngccncatnggcnccgnnngtgnctaaaaaantcgnnngancgccaccncngnnncnntngnncagnntatncncannnncnagtnngatgnngtggnatnccccatantgggcgcctganacntttgngnganantggtnctanntntnntntacnnnanggcgncccctngccnncnatcngnctnnnaaagntnagtanannanancncanagngggtnngntncantangttnctgnnntncncnannctgnctgngnancntgngangnngcaggatnccngnncntncacaaaactgntgnnnggaaangttgcctcttganggnaaangnanannnntncntgcantgtnnanganatctnaangatanggcncgannccttgaanatacctntnntgagcccntatanngcncnanaattntcntnnagatntnnaaganttngctncgantnnnnnatgtnaanatnccgntngaagnnatctngtnncccancnataannnngnaantgnngatnnnacngncntnncncttanngtaacnttanatcnnntgnanaattanntctgtancggcaanagntnnganagnnnngtnatattgtaanncatanatgnntattgnaanttnncatantnntaannnnnnaagcgaaanntcnggnattcntgnctnnncgnnanngnnngcntttgnagnanattnttcnangncncacacgtntnannnnntnntcttnggannnnannnatntannnttgncntcnannatntttnanatncngatgnattcngtatntntnnanntatcngaaaacntanaantnnnatggnnnnntttataatgcaanatganactaacnnaannagttaantngnttnannngnnnctnnncttnntccnntnngtatantatnnncnctanaaaanannttatnttatcnaaatttnnntacgtaatnaganatgctnnnntnnnaananntcngnctanncataannnannaangtaccgctttagtnnnnantnnntnnnaataaattctatnnntngaannntcntanggntnnannanancnaaannnnactttgannnnnanccnggntngttanatanacncantaannnncaagtnttactanatanctantnttaggngnanacnttatantannnannttntacantntntangttatancatctcntnncncaancatcncnaaanngnaatnnnntnnaagntcngnantngtnaaagctnttannattttactaannntttagncaaganaancatcttctcntanntnncananagaantcatngcattttanatnnnnatntntcatcnnnnnactntangtnctnnnatgcccntctgnttntnannttnttnnntncnttannnanaaattgcnnntnnntcgnagaatcatcnncnaacatnnttaacnttactntncnnnatgtnnctnnntantccnttngtaagaattcntgttcacnntnatntcnnttagcncnattgtctaatagaannatncnattnnnatgtntctntntttnnnncattantnnctgtaatcanaacannnttactatngccnttatctcntntg

SEQ ID NO: 909 - DNA, 1478 bp, Homo Sapiens
  misc_feature (3)..(3): n is a, c, g, or t
  misc_feature (299)..(299): n is a, c, g, or t
  misc_feature (379)..(379): n is a, c, g, or t
  misc_feature (452)..(452): n is a, c, g, or t
  misc_feature (463)..(463): n is a, c, g, or t
  misc_feature (478)..(478): n is a, c, g, or t
  misc_feature (490)..(490): n is a, c, g, or t
  misc_feature (516)..(516): n is a, c, g, or t
  misc_feature (519)..(519): n is a, c, g, or t
  misc_feature (528)..(528): n is a, c, g, or t
  misc_feature (540)..(540): n is a, c, g, or t
  misc_feature (543)..(543): n is a, c, g, or t
  misc_feature (558)..(558): n is a, c, g, or t
  misc_feature (564)..(564): n is a, c, g, or t
  misc_feature (579)..(579): n is a, c, g, or t
  misc_feature (586)..(586): n is a, c, g, or t
  misc_feature (591)..(591): n is a, c, g, or t
  misc_feature (598)..(598): n is a, c, g, or t
  misc_feature (606)..(606): n is a, c, g, or t
  misc_feature (609)..(609): n is a, c, g, or t
  misc_feature (618)..(618): n is a, c, g, or t
  misc_feature (621)..(621): n is a, c, g, or t
  misc_feature (625)..(625): n is a, c, g, or t
  misc_feature (645)..(645): n is a, c, g, or t
  misc_feature (648)..(648): n is a, c, g, or t
  misc_feature (658)..(658): n is a, c, g, or t
  misc_feature (666)..(666): n is a, c, g, or t
  misc_feature (672)..(675): n is a, c, g, or t
  misc_feature (686)..(686): n is a, c, g, or t
  misc_feature (688)..(688): n is a, c, g, or t
  misc_feature (697)..(698): n is a, c, g, or t
  misc_feature (700)..(700): n is a, c, g, or t
  misc_feature (704)..(704): n is a, c, g, or t
  misc_feature (706)..(706): n is a, c, g, or t
  misc_feature (713)..(713): n is a, c, g, or t
  misc_feature (720)..(720): n is a, c, g, or t
  misc_feature (728)..(728): n is a, c, g, or t
  misc_feature (730)..(730): n is a, c, g, or t
  misc_feature (732)..(732): n is a, c, g, or t
  misc_feature (735)..(736): n is a, c, g, or t
  misc_feature (744)..(744): n is a, c, g, or t
  misc_feature (750)..(750): n is a, c, g, or t
  misc_feature (760)..(760): n is a, c, g, or t
  misc_feature (768)..(768): n is a, c, g, or t
  misc_feature (772)..(772): n is a, c, g, or t
  misc_feature (774)..(774): n is a, c, g, or t
  misc_feature (778)..(778): n is a, c, g, or t
  misc_feature (782)..(783): n is a, c, g, or t
  misc_feature (794)..(794): n is a, c, g, or t
  misc_feature (797)..(797): n is a, c, g, or t
  misc_feature (815)..(815): n is a, c, g, or t
  misc_feature (817)..(817): n is a, c, g, or t
  misc_feature (821)..(821): n is a, c, g, or t
  misc_feature (823)..(823): n is a, c, g, or t
  misc_feature (826)..(826): n is a, c, g, or t
  misc_feature (832)..(832): n is a, c, g, or t
  misc_feature (834)..(834): n is a, c, g, or t
  misc_feature (839)..(839): n is a, c, g, or t
  misc_feature (843)..(844): n is a, c, g, or t
  misc_feature (849)..(849): n is a, c, g, or t
  misc_feature (856)..(856): n is a, c, g, or t
  misc_feature (866)..(866): n is a, c, g, or t
  misc_feature (870)..(870): n is a, c, g, or t
  misc_feature (872)..(872): n is a, c, g, or t
  misc_feature (874)..(874): n is a, c, g, or t
  misc_feature (876)..(876): n is a, c, g, or t
  misc_feature (879)..(879): n is a, c, g, or t
  misc_feature (881)..(882): n is a, c, g, or t
  misc_feature (884)..(885): n is a, c, g, or t
  misc_feature (889)..(890): n is a, c, g, or t
  misc_feature (901)..(901): n is a, c, g, or t
  misc_feature (910)..(910): n is a, c, g, or t
  misc_feature (914)..(914): n is a, c, g, or t
  misc_feature (921)..(921): n is a, c, g, or t
  misc_feature (925)..(925): n is a, c, g, or t
  misc_feature (927)..(927): n is a, c, g, or t
  misc_feature (936)..(936): n is a, c, g, or t
  misc_feature (948)..(948): n is a, c, g, or t
  misc_feature (959)..(959): n is a, c, g, or t
  misc_feature (961)..(961): n is a, c, g, or t
  misc_feature (963)..(963): n is a, c, g, or t
  misc_feature (966)..(966): n is a, c, g, or t
  misc_feature (975)..(977): n is a, c, g, or t
  misc_feature (981)..(981): n is a, c, g, or t
  misc_feature (985)..(986): n is a, c, g, or t
  misc_feature (988)..(988): n is a, c, g, or t
  misc_feature (990)..(990): n is a, c, g, or t
  misc_feature (992)..(992): n is a, c, g, or t
  misc_feature (995)..(995): n is a, c, g, or t
  misc_feature (997)..(997): n is a, c, g, or t
  misc_feature (1000)..(1000): n is a, c, g, or t
  misc_feature (1002)..(1003): n is a, c, g, or t
  misc_feature (1007)..(1007): n is a, c, g, or t
  misc_feature (1019)..(1019): n is a, c, g, or t
  misc_feature (1022)..(1022): n is a, c, g, or t
  misc_feature (1029)..(1029): n is a, c, g, or t
  misc_feature (1036)..(1037): n is a, c, g, or t
  misc_feature (1042)..(1042): n is a, c, g, or t
  misc_feature (1044)..(1044): n is a, c, g, or t
  misc_feature (1052)..(1053): n is a, c, g, or t
  misc_feature (1064)..(1064): n is a, c, g, or t
  misc_feature (1071)..(1073): n is a, c, g, or t
  misc_feature (1081)..(1081): n is a, c, g, or t
  misc_feature (1085)..(1085): n is a, c, g, or t
  misc_feature (1087)..(1088): n is a, c, g, or t
  misc_feature (1093)..(1094): n is a, c, g, or t
  misc_feature (1096)..(1096): n is a, c, g, or t
  misc_feature (1098)..(1098): n is a, c, g, or t
  misc_feature (1115)..(1115): n is a, c, g, or t
  misc_feature (1123)..(1123): n is a, c, g, or t
  misc_feature (1129)..(1132): n is a, c, g, or t
  misc_feature (1134)..(1134): n is a, c, g, or t
  misc_feature (1144)..(1144): n is a, c, g, or t
  misc_feature (1146)..(1146): n is a, c, g, or t
  misc_feature (1153)..(1153): n is a, c, g, or t
  misc_feature (1155)..(1155): n is a, c, g, or t
  misc_feature (1159)..(1159): n is a, c, g, or t
  misc_feature (1164)..(1164): n is a, c, g, or t
  misc_feature (1169)..(1169): n is a, c, g, or t
  misc_feature (1173)..(1173): n is a, c, g, or t
  misc_feature (1175)..(1175): n is a, c, g, or t
  misc_feature (1178)..(1178): n is a, c, g, or t
  misc_feature (1183)..(1183): n is a, c, g, or t
  misc_feature (1188)..(1189): n is a, c, g, or t
  misc_feature (1195)..(1195): n is a, c, g, or t
  misc_feature (1200)..(1201): n is a, c, g, or t
  misc_feature (1205)..(1206): n is a, c, g, or t
  misc_feature (1216)..(1216): n is a, c, g, or t
  misc_feature (1218)..(1218): n is a, c, g, or t
  misc_feature (1220)..(1220): n is a, c, g, or t
  misc_feature (1223)..(1223): n is a, c, g, or t
  misc_feature (1229)..(1229): n is a, c, g, or t
  misc_feature (1231)..(1231): n is a, c, g, or t
  misc_feature (1234)..(1234): n is a, c, g, or t
  misc_feature (1241)..(1242): n is a, c, g, or t
  misc_feature (1244)..(1245): n is a, c, g, or t
  misc_feature (1249)..(1250): n is a, c, g, or t
  misc_feature (1253)..(1253): n is a, c, g, or t
  misc_feature (1264)..(1264): n is a, c, g, or t
  misc_feature (1268)..(1268): n is a, c, g, or t
  misc_feature (1272)..(1274): n is a, c, g, or t
  misc_feature (1284)..(1284): n is a, c, g, or t
  misc_feature (1289)..(1289): n is a, c, g, or t
  misc_feature (1293)..(1293): n is a, c, g, or t
  misc_feature (1295)..(1295): n is a, c, g, or t
  misc_feature (1297)..(1297): n is a, c, g, or t
  misc_feature (1299)..(1299): n is a, c, g, or t
  misc_feature (1302)..(1302): n is a, c, g, or t
  misc_feature (1315)..(1315): n is a, c, g, or t
  misc_feature (1317)..(1317): n is a, c, g, or t
  misc_feature (1319)..(1319): n is a, c, g, or t
  misc_feature (1330)..(1331): n is a, c, g, or t
  misc_feature (1341)..(1342): n is a, c, g, or t
  misc_feature (1344)..(1345): n is a, c, g, or t
  misc_feature (1348)..(1348): n is a, c, g, or t
  misc_feature (1353)..(1353): n is a, c, g, or t
  misc_feature (1355)..(1355): n is a, c, g, or t
  misc_feature (1360)..(1360): n is a, c, g, or t
  misc_feature (1362)..(1362): n is a, c, g, or t
  misc_feature (1366)..(1366): n is a, c, g, or t
  misc_feature (1385)..(1385): n is a, c, g, or t
  misc_feature (1394)..(1394): n is a, c, g, or t
  misc_feature (1398)..(1398): n is a, c, g, or t
  misc_feature (1405)..(1406): n is a, c, g, or t
  misc_feature (1409)..(1409): n is a, c, g, or t
  misc_feature (1422)..(1422): n is a, c, g, or t
  misc_feature (1425)..(1426): n is a, c, g, or t
  misc_feature (1434)..(1434): n is a, c, g, or t
  misc_feature (1438)..(1438): n is a, c, g, or t
  misc_feature (1449)..(1449): n is a, c, g, or t
  misc_feature (1456)..(1456): n is a, c, g, or t
  misc_feature (1462)..(1463): n is a, c, g, or t
  misc_feature (1474)..(1474): n is a, c, g, or t
  misc_feature (1476)..(1478): n is a, c, g, or t
cantaagagaaaattactatgagaggatcgcatcaccatcaccatcacggatcctatttaggtgacactatagaatcgtcgacccacgcgtccgcccacgcgtccgagcggagcggcggcgggcgcagctagcgggtcggccgcggagcggaggtgcagctcggcttcccccggcacccctccccctcgggcgccagccccacccctccgccggccgggccgaccccgccgtactatcccctgcggcgcgagcccggggcggctccaagcgccccccagcagacccccatcatgggcanccagagctccaaggctccccggggcgacgtgaccgccgaggaggcagcaggcgcttcccccgcgaaggccaacggccagnagaatggccacgtgaaaagcaatggagacttatcccccaagggtgaaggggagtcgccccctgtgaacggaanagatgaggcanccggggccactggcnatgccatcgagncagcaccccctaaccagggtgctgangcnaagggggangtcccccccaanganacccccaagaagaanaagaanttctctttcaagaanactttcnaattnagcggcntgtccttnaanaaaaatccnaangagngtgggggtgattcttctgcntcntcacccacanaggaaaancaggannnnggggagatctntncctgaatcnnanaatngnattgttnaagaaanggaatgcncncnatnnaccccttnaataanccattaatcnccaaagtnctangngggnatanntttagtgtcanccntcaaaaaaaaagaaagananggancncangattananaattntatnnccttnccttaanggttcggaanaatngntntntantnncnntcannttcttaaaaancaataattntttnattaagngccngntggtaatanttataatattcnaaaaacatgtntntnttnatttagtannnacantatnncntnanacntnttntnncctngcttttccttanctntgttcantaaaagnnatggntnttatatanntatcttccaantccaatnnncccttttnttcntnnctttnncntntaatttatccaaattanccaatttngttttnnnncnttttagtccnanttaaaantnattntttanatatnttcnanaanttatntattnnttgttnttaanntctnntctcttttanananttntttttntntcntaactcnnanntaanntanatataatgttntttncatnnncttattattnaaaanaatntngntntcncaattcccaaaantntnattgataatannttggtctttnnannacnatatntnatatngncatncaactctcataattatatngatcatctntttnactatannatnatattctctaatntcnntagataantatntcctgtcattntaaaganatgtannattattaattntnnn

SEQ ID NO: 910 - DNA, 1362 bp, Homo Sapiens
  misc_feature (1)..(1): n is a, c, g, or t
  misc_feature (632)..(632): n is a, c, g, or t
  misc_feature (807)..(807): n is a, c, g, or t
  misc_feature (835)..(835): n is a, c, g, or t
  misc_feature (840)..(840): n is a, c, g, or t
  misc_feature (871)..(871): n is a, c, g, or t
  misc_feature (883)..(883): n is a, c, g, or t
  misc_feature (911)..(911): n is a, c, g, or t
  misc_feature (925)..(925): n is a, c, g, or t
  misc_feature (933)..(933): n is a, c, g, or t
  misc_feature (935)..(935): n is a, c, g, or t
  misc_feature (952)..(952): n is a, c, g, or t
  misc_feature (976)..(976): n is a, c, g, or t
  misc_feature (982)..(982): n is a, c, g, or t
  misc_feature (1011)..(1011): n is a, c, g, or t
  misc_feature (1019)..(1019): n is a, c, g, or t
  misc_feature (1021)..(1021): n is a, c, g, or t
  misc_feature (1031)..(1031): n is a, c, g, or t
  misc_feature (1039)..(1039): n is a, c, g, or t
  misc_feature (1046)..(1046): n is a, c, g, or t
  misc_feature (1052)..(1052): n is a, c, g, or t
  misc_feature (1066)..(1066): n is a, c, g, or t
  misc_feature (1069)..(1069): n is a, c, g, or t
  misc_feature (1072)..(1072): n is a, c, g, or t
  misc_feature (1088)..(1088): n is a, c, g, or t
  misc_feature (1111)..(1111): n is a, c, g, or t
  misc_feature (1113)..(1113): n is a, c, g, or t
  misc_feature (1117)..(1117): n is a, c, g, or t
  misc_feature (1119)..(1119): n is a, c, g, or t
  misc_feature (1129)..(1129): n is a, c, g, or t
  misc_feature (1133)..(1133): n is a, c, g, or t
  misc_feature (1136)..(1136): n is a, c, g, or t
  misc_feature (1140)..(1140): n is a, c, g, or t
  misc_feature (1142)..(1142): n is a, c, g, or t
  misc_feature (1144)..(1144): n is a, c, g, or t
  misc_feature (1154)..(1154): n is a, c, g, or t
  misc_feature (1157)..(1157): n is a, c, g, or t
  misc_feature (1161)..(1162): n is a, c, g, or t
  misc_feature (1166)..(1166): n is a, c, g, or t
  misc_feature (1183)..(1183): n is a, c, g, or t
  misc_feature (1196)..(1196): n is a, c, g, or t
  misc_feature (1210)..(1211): n is a, c, g, or t
  misc_feature (1227)..(1227): n is a, c, g, or t
  misc_feature (1229)..(1229): n is a, c, g, or t
  misc_feature (1232)..(1232): n is a, c, g, or t
  misc_feature (1244)..(1244): n is a, c, g, or t
  misc_feature (1247)..(1247): n is a, c, g, or t
  misc_feature (1254)..(1254): n is a, c, g, or t
  misc_feature (1257)..(1257): n is a, c, g, or t
  misc_feature (1278)..(1279): n is a, c, g, or t
  misc_feature (1285)..(1285): n is a, c, g, or t
  misc_feature (1289)..(1289): n is a, c, g, or t
  misc_feature (1292)..(1292): n is a, c, g, or t
  misc_feature (1309)..(1311): n is a, c, g, or t
  misc_feature (1323)..(1323): n is a, c, g, or t
  misc_feature (1330)..(1330): n is a, c, g, or t
  misc_feature (1333)..(1333): n is a, c, g, or t
  misc_feature (1336)..(1338): n is a, c, g, or t
  misc_feature (1345)..(1345): n is a, c, g, or t
  misc_feature (1351)..(1351): n is a, c, g, or t
  misc_feature (1360)..(1361): n is a, c, g, or t
naatagagaaattactatgagaggatcgcatcaccatcaccattcacggatcctatttaggtgacactatagaatcgtcgacccacgcgtccgcagtggacttgaatgggcatctctggggccacccaagccctgtggccaccgcgctgctttgtaaatcagggaaaggtgtagtgtccgttgagccttgggtgctgctgtcacagaagcacactggggcctgtgtgggaggcagcgggggctccttgacccttgagggcacctggccacagggagctcattgcctcagctctgcctccccttctccccagcctggctttctccggaccccctgtttctggaacagaggagggtcagagaagcaaagaccgaagaggacggccctgccaacaccgagcagaagctgaagtcctttccagaggaccctcagcacctgggggagtggggccacctggaccctgccgaggagaacctgaagagctaccggaagctgctcctgtgggggtatcagctttcccagcctgacgctgcctccaggctggacactgaggaactccggttggtggaaagagatccacaaggaagcagcctcccaggcgggaggcggcaggagagcgctgggtgcgcctgcnaggaggccgcccccgcgggggtgctgcctgagctgcctacggaggcgccccctggggacgcccttgccgatcccccgtcgggcaccactgaggaggaggaagagcagcctgggaaggccccggacccgcaggacccccaggacgcggagtccgactctgccaccggatcgcagangcagtccgtcatccagcagcctgccccnggaanaggggcacggcgaaaactgggaaaccaaaanggccgcaccccnaaggaatggggaacgggcaaaaccctcnaagggcgtctctanctccggcnanagcgcaaggcttggagnccgggcaaggcccctggggctganaaaccnggcttgtcccgcgggaaaaccctatgccntgcgggcnantgcggggaangcccttcnccgtggnttcccnccccttgaaggganccnccnaaccacccatggcggnccggaaacccctacccccttttnanggcntncttgaaaaancttncantttnancntggcccttanccnaaanncccnaaaaaacccccaaaaangaaaaaaactttncccccttggggggnncccgggggcccccaangntcncccgaaaaaccnaanggggggntangggggggggtcccccaaaaannggggangggnagnttcccccccccccaaannnaaaaaaaacccnttttttnccnttnnnaaggccntttttnggggaaaanna

SEQ ID NO: 911 - DNA, 1423 bp, Homo Sapiens
  misc_feature (734)..(734): n is a, c, g, or t
  misc_feature (755)..(755): n is a, c, g, or t
  misc_feature (785)..(785): n is a, c, g, or t
  misc_feature (814)..(814): n is a, c, g, or t
  misc_feature (825)..(825): n is a, c, g, or t
  misc_feature (837)..(838): n is a, c, g, or t
  misc_feature (843)..(843): n is a, c, g, or t
  misc_feature (859)..(859): n is a, c, g, or t
  misc_feature (862)..(862): n is a, c, g, or t
  misc_feature (878)..(878): n is a, c, g, or t
  misc_feature (891)..(891): n is a, c, g, or t
  misc_feature (907)..(907): n is a, c, g, or t
  misc_feature (910)..(910): n is a, c, g, or t
  misc_feature (922)..(922): n is a, c, g, or t
  misc_feature (934)..(934): n is a, c, g, or t
  misc_feature (944)..(944): n is a, c, g, or t
  misc_feature (948)..(948): n is a, c, g, or t
  misc_feature (955)..(955): n is a, c, g, or t
  misc_feature (959)..(959): n is a, c, g, or t
  misc_feature (963)..(963): n is a, c, g, or t
  misc_feature (970)..(970): n is a, c, g, or t
  misc_feature (977)..(977): n is a, c, g, or t
  misc_feature (995)..(995): n is a, c, g, or t
  misc_feature (998)..(998): n is a, c, g, or t
  misc_feature (1000)..(1000): n is a, c, g, or t
  misc_feature (1007)..(1007): n is a, c, g, or t
  misc_feature (1011)..(1011): n is a, c, g, or t
  misc_feature (1014)..(1014): n is a, c, g, or t
  misc_feature (1027)..(1027): n is a, c, g, or t
  misc_feature (1034)..(1034): n is a, c, g, or t
  misc_feature (1036)..(1036): n is a, c, g, or t
  misc_feature (1039)..(1039): n is a, c, g, or t
  misc_feature (1042)..(1042): n is a, c, g, or t
  misc_feature (1053)..(1053): n is a, c, g, or t
  misc_feature (1060)..(1060): n is a, c, g, or t
  misc_feature (1083)..(1083): n is a, c, g, or t
  misc_feature (1092)..(1093): n is a, c, g, or t
  misc_feature (1095)..(1095): n is a, c, g, or t
  misc_feature (1097)..(1097): n is a, c, g, or t
  misc_feature (1104)..(1105): n is a, c, g, or t
  misc_feature (1120)..(1120): n is a, c, g, or t
  misc_feature (1137)..(1138): n is a, c, g, or t
  misc_feature (1141)..(1141): n is a, c, g, or t
  misc_feature (1148)..(1148): n is a, c, g, or t
  misc_feature (1151)..(1151): n is a, c, g, or t
  misc_feature (1155)..(1155): n is a, c, g, or t
  misc_feature (1161)..(1161): n is a, c, g, or t
  misc_feature (1163)..(1163): n is a, c, g, or t
  misc_feature (1165)..(1167): n is a, c, g, or t
  misc_feature (1171)..(1171): n is a, c, g, or t
  misc_feature (1177)..(1177): n is a, c, g, or t
  misc_feature (1181)..(1181): n is a, c, g, or t
  misc_feature (1185)..(1185): n is a, c, g, or t
  misc_feature (1187)..(1187): n is a, c, g, or t
  misc_feature (1189)..(1189): n is a, c, g, or t
  misc_feature (1192)..(1192): n is a, c, g, or t
  misc_feature (1203)..(1203): n is a, c, g, or t
  misc_feature (1212)..(1212): n is a, c, g, or t
  misc_feature (1215)..(1216): n is a, c, g, or t
  misc_feature (1222)..(1222): n is a, c, g, or t
  misc_feature (1241)..(1241): n is a, c, g, or t
  misc_feature (1247)..(1248): n is a, c, g, or t
  misc_feature (1251)..(1251): n is a, c, g, or t
  misc_feature (1253)..(1253): n is a, c, g, or t
  misc_feature (1267)..(1267): n is a, c, g, or t
  misc_feature (1270)..(1270): n is a, c, g, or t
  misc_feature (1274)..(1274): n is a, c, g, or t
  misc_feature (1291)..(1292): n is a, c, g, or t
  misc_feature (1294)..(1294): n is a, c, g, or t
  misc_feature (1301)..(1301): n is a, c, g, or t
  misc_feature (1311)..(1311): n is a, c, g, or t
  misc_feature (1321)..(1321): n is a, c, g, or t
  misc_feature (1330)..(1331): n is a, c, g, or t
  misc_feature (1339)..(1341): n is a, c, g, or t
  misc_feature (1344)..(1344): n is a, c, g, or t
  misc_feature (1359)..(1359): n is a, c, g, or t
  misc_feature (1367)..(1368): n is a, c, g, or t
  misc_feature (1371)..(1372): n is a, c, g, or t
  misc_feature (1379)..(1379): n is a, c, g, or t
  misc_feature (1383)..(1383): n is a, c, g, or t
  misc_feature (1394)..(1395): n is a, c, g, or t
  misc_feature (1404)..(1404): n is a, c, g, or t
  misc_feature (1406)..(1406): n is a, c, g, or t
  misc_feature (1411)..(1412): n is a, c, g, or t
  misc_feature (1415)..(1415): n is a, c, g, or t
  misc_feature (1417)..(1417): n is a, c, g, or t
  misc_feature (1420)..(1420): n is a, c, g, or t
tagagagaattactatgagaggatcgcatcaccatcaccatcacggatcctatttaggtgacactatagaatcgtcgacccacgcgtccgattctcctgtggagaacaggtggccccgagatcaggcccttttttgctctttgtattttattttgaaactgtatttaatgcttttatatgaaagggggaggggcggggacagagctgacccagtcacccttatgtgcaaatgtcttatttattatgcgtgtatcagagataagctgtgaggtggtggagggaggacctgaaggaaggaggagcgagggcagaggcggggacgggaggaccccaactagctgtgctgatgttaatcccgctgggagactccgggccctactgtctgctcttcacaaagccaggctgctgcaggaacagttcccgcggtcctaaagccggggcggggaggctagtgggtggaacttgagggttgggtctggaggaagagatgcctgggcagcgtggtccagcccctgcctcggggtggaaaggcagagagcaaagaggaggcccctcttattccggacccccaggccagagcccaggagtgggaaagcagagggcaaagaggaggcccctcctctcatccctgacccccaggccagagcctaaggttcaagtgcctcaggcccagtccccttgacgcttcctgtttgggagttggaattttataccacggattttatagcattttnatataattgaggaattgtcanaattggaaaagggcccctggagatcactantactacccctccctcaccttcacaaatangtaaattgganccccaggaaccnnagatnatcaccacagcccagntanggacagttcaagaacntagaatgaaaaanccctaactcctgaccncantgtttctttggncgaatgccccanctgcttcccnaatnccctggncaanttantaaaaanttgtcanggcctgcccaaaagattnaanantttggcnaatncangccccccccgggngaatttntnacnccnggaaaggggcnaaccccntccccctgccctgggaaaaaacnaccgaaccnntncngggcccnnctgaaagggcccatncaaattttcctttcccnnccnaaaaaantcnaaangggggngntnnncccnaggccnaagnttcncncncanggggctttttnttttttttnganncccccnggtttccgaaaaaccaaanggtttnnttncnaaaaaaaatccccnggntttnacccccccttttaaaanntnaaacttnaacaaatttntgggcccccngggcccccnntttttttnnnccntttttaaaaaaaaancctttttnnccnntaaaaangaanggggaaatttnnccccccccntntaacnnaangnatnccc

SEQ ID NO: 912 - DNA, 1379 bp, Homo Sapiens
  misc_feature (794)..(794): n is a, c, g, or t
  misc_feature (829)..(829): n is a, c, g, or t
  misc_feature (880)..(880): n is a, c, g, or t
  misc_feature (904)..(904): n is a, c, g, or t
  misc_feature (929)..(929): n is a, c, g, or t
  misc_feature (934)..(934): n is a, c, g, or t
  misc_feature (941)..(941): n is a, c, g, or t
  misc_feature (946)..(947): n is a, c, g, or t
  misc_feature (962)..(962): n is a, c, g, or t
  misc_feature (966)..(966): n is a, c, g, or t
  misc_feature (973)..(973): n is a, c, g, or t
  misc_feature (985)..(988): n is a, c, g, or t
  misc_feature (990)..(1008): n is a, c, g, or t
  misc_feature (1010)..(1024): n is a, c, g, or t
  misc_feature (1026)..(1035): n is a, c, g, or t
  misc_feature (1037)..(1039): n is a, c, g, or t
  misc_feature (1043)..(1043): n is a, c, g, or t
  misc_feature (1046)..(1046): n is a, c, g, or t
  misc_feature (1048)..(1048): n is a, c, g, or t
  misc_feature (1050)..(1050): n is a, c, g, or t
  misc_feature (1055)..(1055): n is a, c, g, or t
  misc_feature (1057)..(1057): n is a, c, g, or t
  misc_feature (1061)..(1061): n is a, c, g, or t
  misc_feature (1063)..(1063): n is a, c, g, or t
  misc_feature (1065)..(1068): n is a, c, g, or t
  misc_feature (1071)..(1072): n is a, c, g, or t
  misc_feature (1075)..(1075): n is a, c, g, or t
  misc_feature (1079)..(1079): n is a, c, g, or t
  misc_feature (1083)..(1083): n is a, c, g, or t
  misc_feature (1086)..(1086): n is a, c, g, or t
  misc_feature (1090)..(1090): n is a, c, g, or t
  misc_feature (1095)..(1095): n is a, c, g, or t
  misc_feature (1100)..(1101): n is a, c, g, or t
  misc_feature (1105)..(1105): n is a, c, g, or t
  misc_feature (1110)..(1110): n is a, c, g, or t
  misc_feature (1114)..(1116): n is a, c, g, or t
  misc_feature (1119)..(1119): n is a, c, g, or t
  misc_feature (1132)..(1133): n is a, c, g, or t
  misc_feature (1135)..(1137): n is a, c, g, or t
  misc_feature (1139)..(1139): n is a, c, g, or t
  misc_feature (1142)..(1142): n is a, c, g, or t
  misc_feature (1149)..(1149): n is a, c, g, or t
  misc_feature (1156)..(1156): n is a, c, g, or t
  misc_feature (1158)..(1159): n is a, c, g, or t
  misc_feature (1163)..(1163): n is a, c, g, or t
  misc_feature (1172)..(1173): n is a, c, g, or t
  misc_feature (1195)..(1195): n is a, c, g, or t
  misc_feature (1198)..(1198): n is a, c, g, or t
  misc_feature (1202)..(1203): n is a, c, g, or t
  misc_feature (1205)..(1205): n is a, c, g, or t
  misc_feature (1207)..(1207): n is a, c, g, or t
  misc_feature (1214)..(1215): n is a, c, g, or t
  misc_feature (1217)..(1218): n is a, c, g, or t
  misc_feature (1221)..(1222): n is a, c, g, or t
  misc_feature (1224)..(1224): n is a, c, g, or t
  misc_feature (1228)..(1229): n is a, c, g, or t
  misc_feature (1232)..(1233): n is a, c, g, or t
  misc_feature (1242)..(1243): n is a, c, g, or t
  misc_feature (1245)..(1250): n is a, c, g, or t
  misc_feature (1252)..(1252): n is a, c, g, or t
  misc_feature (1264)..(1264): n is a, c, g, or t
  misc_feature (1270)..(1272): n is a, c, g, or t
  misc_feature (1275)..(1279): n is a, c, g, or t
  misc_feature (1292)..(1295): n is a, c, g, or t
  misc_feature (1299)..(1304): n is a, c, g, or t
  misc_feature (1307)..(1308): n is a, c, g, or t
  misc_feature (1310)..(1312): n is a, c, g, or t
  misc_feature (1314)..(1317): n is a, c, g, or t
  misc_feature (1326)..(1326): n is a, c, g, or t
  misc_feature (1328)..(1328): n is a, c, g, or t
  misc_feature (1330)..(1332): n is a, c, g, or t
  misc_feature (1342)..(1343): n is a, c, g, or t
  misc_feature (1353)..(1353): n is a, c, g, or t
  misc_feature (1355)..(1356): n is a, c, g, or t
  misc_feature (1358)..(1358): n is a, c, g, or t
  misc_feature (1361)..(1361): n is a, c, g, or t
  misc_feature (1367)..(1369): n is a, c, g, or t
  misc_feature (1378)..(1378): n is a, c, g, or t
tagagaaattactatgagaggatcgcatcaccatcaccatcacggatcctatttaggtgacactatagaatcgtcgacccacgcgtccgcggacgcgtgggctggcgacaaaatggctgcccgagggagacgggcggagcctcagggccgggaggctccgggccccgcgggcggtggcggtggcgggagccgttgggctgagtcgggatcggggacgtcgcccgagagcggggacgaggaggtgtcgggcgcgggttcgagcccggtgtcgggcggcgtgaacttgttcgccaacgacggcagcttcctggagctgttcaagcggaagatggaggaggagcagcggcagcggcaggaggagccgcccccgggtccgcagcgacccgaccagtcggccgccgccgctggccccggggatccgaagaggaagggcggtccgggctccacacttagcttcgtgggcaaacgcagaggcgggaacaaactagccctcaagacgggaatagtagccaagaagcagaagacggaggatgaggtattaacaagtaaaggtgacgcgtgggccaagtacatggcagaagtgaaaaagtacaaagctcaccagtgcggtgacgatgataaaactcggcccctggtgaaatgacgcccctcccccacctgcccatggcctgggactctctgcgatgtacataactatttaatgcagcggcagcggcgacagccttccctgagaggacttaaaagcagaaggaaaaccgagatgcttcccgcagcccgtggaacgattctccagnactcttttttttaccttgagcacttgcctcgtganacttcataaaacagtggtttactgtcccccccctttctcacctcctcattntctctggctcttttctgtctttcntcttctcaacctccttcccttcccnttaanccatcantttcnngggaaataaaaaaantttntctttanaaaaaaaaaaannnnannnnnnnnnnnnnnnnnnnannnnnnnnnnnnnnnannnnnnnnnnannngggnggncncntcccnanaaangnannnnaannaanttantttnaantaancttgnacccnntttnaaaantccnnntantgacctcaaaacnncnnntngtnttttttnaaaaccntnntttncccccgggnnttttttttttgtaaaaaacaanttntttnntnanttttttnnannttnngnattnnatnnaaaaaaatnncnnnnnntntccccctttaantttccnnnggnnnnnaaaaaaatttttnnnntttnnnnnnttnncnnngnnnnaaaaaaaancntnnnttttatatanncctttttaancnnanaanaaaaannnatttttttnc

SEQ ID NO: 913 - DNA, 1244 bp, Homo Sapiens
  misc_feature (858)..(858): n is a, c, g, or t
  misc_feature (933)..(933): n is a, c, g, or t
  misc_feature (937)..(937): n is a, c, g, or t
  misc_feature (950)..(950): n is a, c, g, or t
  misc_feature (954)..(955): n is a, c, g, or t
  misc_feature (989)..(989): n is a, c, g, or t
  misc_feature (993)..(993): n is a, c, g, or t
  misc_feature (1022)..(1022): n is a, c, g, or t
  misc_feature (1024)..(1059): n is a, c, g, or t
  misc_feature (1064)..(1064): n is a, c, g, or t
  misc_feature (1070)..(1070): n is a, c, g, or t
  misc_feature (1072)..(1072): n is a, c, g, or t
  misc_feature (1078)..(1078): n is a, c, g, or t
  misc_feature (1080)..(1081): n is a, c, g, or t
  misc_feature (1086)..(1086): n is a, c, g, or t
  misc_feature (1088)..(1088): n is a, c, g, or t
  misc_feature (1091)..(1092): n is a, c, g, or t
  misc_feature (1096)..(1096): n is a, c, g, or t
  misc_feature (1099)..(1099): n is a, c, g, or t
  misc_feature (1109)..(1109): n is a, c, g, or t
  misc_feature (1111)..(1111): n is a, c, g, or t
  misc_feature (1113)..(1113): n is a, c, g, or t
  misc_feature (1125)..(1125): n is a, c, g, or t
  misc_feature (1129)..(1129): n is a, c, g, or t
  misc_feature (1151)..(1151): n is a, c, g, or t
  misc_feature (1154)..(1154): n is a, c, g, or t
  misc_feature (1158)..(1158): n is a, c, g, or t
  misc_feature (1164)..(1164): n is a, c, g, or t
  misc_feature (1176)..(1176): n is a, c, g, or t
  misc_feature (1185)..(1185): n is a, c, g, or t
  misc_feature (1218)..(1218): n is a, c, g, or t
  misc_feature (1239)..(1239): n is a, c, g, or t
  misc_feature (1241)..(1243): n is a, c, g, or t
tagagaaaattactatgagaggatcgcatcaccatcaccatcacggatcctatttaggtgacactatagaatcgtcgacccacgcgtccgaaaagagaaggcgctgtcccgctcttgctacggtggcctggaggagtggcgaaaccggaacagagaatttatcacttctgggactcacagtcgtgatgtctttcaagagggaaggagacgattggagtcaactcaatgtgctcaaaaaaagaagagtcggggacctcctagccagttacattccagaggatgaggcgctgatgcttcgggatggacgctttgcttgtgccatctgcccccatcgaccggtactggacaccctggccatgctgactgcccaccgtgcaggcaagaaacatctgtccagcttgcagcttttctatggcaagaagcagccgggaaaggaaagaaagcagaatccaaaacatcagaatgaattgagaagggaagaaaccaaagctgaggctcctctgctaactcagacacgacttatcacccagagtgctctgcacagagctccccactataacagttgctgccgccggaagtacaggtatgggacgggaaagccagaggtaggaaggctcagaaggagacagatggctctaaaagagttttccagtgtgtattctgaggaatactagtgttctggagatgttacttagtgtttcaagaaaaggagaattttggctgggcgcggtgactcacgcctgtaatcccagcacttttggaggctgaggtgggtggatcacttgaggtcaggagttcaagaccagcctggccaacatggtgaaatcctgtctctaccaaaaaatgtaaaaaaattanctgggtgtgtggtgtgtgcctgtaatcccagctactcaagaaggctgaagcaggaaaattgcttgaatccggganacanaggttgcagtgancccnnggtcacacccacttccctccagccctggggtganaaantgagactcccttctccaaaaaaaaaaaanannnnnnnnnnnnnnnnnnnnnnnnnnnnnnnnnnnnggggnggcccncncccctnannggggngnccnnaatnaanccttaaattnancntgaacttgggancccnctggttgaaaaaaattccccgnaantgancccccnaaaccccccttnggggatttnttttcaaaaaaccccccgtttcccccccggggnttttttttttgggggaaaaancnnnc

SEQ ID NO: 914 - DNA, 1312 bp, Homo Sapiens
  misc_feature (954)..(954): n is a, c, g, or t
  misc_feature (973)..(973): n is a, c, g, or t
  misc_feature (986)..(987): n is a, c, g, or t
  misc_feature (1007)..(1007): n is a, c, g, or t
  misc_feature (1023)..(1023): n is a, c, g, or t
  misc_feature (1030)..(1030): n is a, c, g, or t
  misc_feature (1048)..(1048): n is a, c, g, or t
  misc_feature (1050)..(1050): n is a, c, g, or t
  misc_feature (1057)..(1057): n is a, c, g, or t
  misc_feature (1062)..(1062): n is a, c, g, or t
  misc_feature (1064)..(1064): n is a, c, g, or t
  misc_feature (1067)..(1067): n is a, c, g, or t
  misc_feature (1078)..(1078): n is a, c, g, or t
  misc_feature (1086)..(1086): n is a, c, g, or t
  misc_feature (1092)..(1092): n is a, c, g, or t
  misc_feature (1105)..(1105): n is a, c, g, or t
  misc_feature (1107)..(1107): n is a, c, g, or t
  misc_feature (1111)..(1111): n is a, c, g, or t
  misc_feature (1124)..(1124): n is a, c, g, or t
  misc_feature (1130)..(1130): n is a, c, g, or t
  misc_feature (1134)..(1134): n is a, c, g, or t
  misc_feature (1138)..(1138): n is a, c, g, or t
  misc_feature (1150)..(1150): n is a, c, g, or t
  misc_feature (1153)..(1153): n is a, c, g, or t
  misc_feature (1157)..(1157): n is a, c, g, or t
  misc_feature (1159)..(1159): n is a, c, g, or t
  misc_feature (1176)..(1176): n is a, c, g, or t
  misc_feature (1183)..(1183): n is a, c, g, or t
  misc_feature (1189)..(1189): n is a, c, g, or t
  misc_feature (1192)..(1193): n is a, c, g, or t
  misc_feature (1200)..(1200): n is a, c, g, or t
  misc_feature (1202)..(1203): n is a, c, g, or t
  misc_feature (1210)..(1210): n is a, c, g, or t
  misc_feature (1218)..(1218): n is a, c, g, or t
  misc_feature (1220)..(1220): n is a, c, g, or t
  misc_feature (1229)..(1229): n is a, c, g, or t
  misc_feature (1231)..(1246): n is a, c, g, or t
  misc_feature (1266)..(1266): n is a, c, g, or t
  misc_feature (1269)..(1269): n is a, c, g, or t
  misc_feature (1276)..(1276): n is a, c, g, or t
  misc_feature (1279)..(1279): n is a, c, g, or t
  misc_feature (1288)..(1288): n is a, c, g, or t
  misc_feature (1297)..(1297): n is a, c, g, or t
aattagagagaattaactatggagaggatcgcatcaccatcaccatcacggatcctatttaggtgacactatagaatcgtcgacccacgcgtccgcccacgcgtccggctttgtctgtccggcaagccgacggcccgctgctggcctccgtgacgcggcctcctccgcgcctcgcggcatggcgtcggaggggccgcgggagcccgaaagcgagggcatcaagttatcagcagatgtcaaaccatttgtccccagatttgccgggctcaatgtggcatggttagagtcctcagaagcatgtgtcttccccagctctgcagccacatactatccgtttgttcaggaaccaccagtgacagagcagaaaatatatactgaagacatggcctttggagcttcaacttttccacctcagtatttatcttctgagataactcttcatccatatgcctattctccttatacccttgactccacacagaatgtttactcagtgcctggctcccagtatctttataaccaacccagttgttaccgaggttttcaaacagtgaagcatcgaaatgagaacacatgccctctcccacaagaaatgaaagctctgtttaagaagaaaacctatgatgagaaaaaaacgtatgatcagcaaaagtttgacagtgaaagggctgatggaactatatcatctgagataaaatcagctagaggttcacatcatttgtccatttacgctgagaatagtttgaaatcagatggttaccataagcgaacagacaggaaatccagaatcattgcaaaaaatgtatctacctccaaacctgagtttgaatttaccacactggactttcctgaactgcaaggtgcagagaacaatatgtcagagatacagaagcaacccaagtggggacctgtccactctgtctctaccgacatttctcttctaaagaaaagtantaaaaaccagctgcagtgnttatcaaaggggnnaaatagtggggaaaaaaaancccaaatgaaatctgntaactgnctaatggccgctaccaantnctccttncatgnanaanaacaaaatccnaaaaaaangttagnaaacccattcttntngaancttttatcttcgnattccnttcntacnaaaaaaaaaaanccntttntnctcccaacccaaaagtntaaagcntccaanggnnatgaccntnnaaaaaanggaacccncnaaaaaaaanannnnnnnnnnnnnnnnaaaaaggggggccccccccnaangggggcnaanaacttaatnacgaatggnaccccgggaaaaaac

SEQ ID NO: 915 - DNA, 1335 bp, Homo Sapiens
  misc_feature (890)..(890): n is a, c, g, or t
  misc_feature (960)..(960): n is a, c, g, or t
  misc_feature (965)..(965): n is a, c, g, or t
  misc_feature (984)..(985): n is a, c, g, or t
  misc_feature (991)..(991): n is a, c, g, or t
  misc_feature (1000)..(1000): n is a, c, g, or t
  misc_feature (1010)..(1010): n is a, c, g, or t
  misc_feature (1017)..(1017): n is a, c, g, or t
  misc_feature (1020)..(1020): n is a, c, g, or t
  misc_feature (1040)..(1040): n is a, c, g, or t
  misc_feature (1042)..(1042): n is a, c, g, or t
  misc_feature (1056)..(1056): n is a, c, g, or t
  misc_feature (1059)..(1059): n is a, c, g, or t
  misc_feature (1068)..(1068): n is a, c, g, or t
  misc_feature (1070)..(1070): n is a, c, g, or t
  misc_feature (1085)..(1085): n is a, c, g, or t
  misc_feature (1094)..(1094): n is a, c, g, or t
  misc_feature (1096)..(1096): n is a, c, g, or t
  misc_feature (1102)..(1102): n is a, c, g, or t
  misc_feature (1104)..(1105): n is a, c, g, or t
  misc_feature (1109)..(1109): n is a, c, g, or t
  misc_feature (1113)..(1113): n is a, c, g, or t
  misc_feature (1116)..(1116): n is a, c, g, or t
  misc_feature (1123)..(1123): n is a, c, g, or t
  misc_feature (1125)..(1126): n is a, c, g, or t
  misc_feature (1133)..(1133): n is a, c, g, or t
  misc_feature (1136)..(1136): n is a, c, g, or t
  misc_feature (1139)..(1139): n is a, c, g, or t
  misc_feature (1165)..(1165): n is a, c, g, or t
  misc_feature (1167)..(1167): n is a, c, g, or t
  misc_feature (1169)..(1169): n is a, c, g, or t
  misc_feature (1171)..(1172): n is a, c, g, or t
  misc_feature (1177)..(1177): n is a, c, g, or t
  misc_feature (1182)..(1182): n is a, c, g, or t
  misc_feature (1201)..(1201): n is a, c, g, or t
  misc_feature (1204)..(1206): n is a, c, g, or t
  misc_feature (1212)..(1212): n is a, c, g, or t
  misc_feature (1214)..(1214): n is a, c, g, or t
  misc_feature (1217)..(1217): n is a, c, g, or t
  misc_feature (1219)..(1219): n is a, c, g, or t
  misc_feature (1227)..(1227): n is a, c, g, or t
  misc_feature (1230)..(1230): n is a, c, g, or t
  misc_feature (1232)..(1232): n is a, c, g, or t
  misc_feature (1238)..(1240): n is a, c, g, or t
  misc_feature (1248)..(1248): n is a, c, g, or t
  misc_feature (1251)..(1251): n is a, c, g, or t
  misc_feature (1255)..(1255): n is a, c, g, or t
  misc_feature (1260)..(1260): n is a, c, g, or t
  misc_feature (1266)..(1267): n is a, c, g, or t
  misc_feature (1269)..(1269): n is a, c, g, or t
  misc_feature (1273)..(1275): n is a, c, g, or t
  misc_feature (1279)..(1281): n is a, c, g, or t
  misc_feature (1283)..(1283): n is a, c, g, or t
  misc_feature (1285)..(1287): n is a, c, g, or t
  misc_feature (1291)..(1293): n is a, c, g, or t
  misc_feature (1304)..(1306): n is a, c, g, or t
  misc_feature (1308)..(1309): n is a, c, g, or t
  misc_feature (1311)..(1313): n is a, c, g, or t
  misc_feature (1316)..(1318): n is a, c, g, or t
  misc_feature (1321)..(1321): n is a, c, g, or t
  misc_feature (1324)..(1325): n is a, c, g, or t
  misc_feature (1328)..(1331): n is a, c, g, or t
atagagaaattactatgagaggatcgcatcaccatcaccatcacggatcctatttaggtgacactatagaatcgtcgacccacgcgtccggtttgctgccggagcggagtctccggccggcgtccagtttgagtctaggttggagttggaaccgtggagatgcggaaggaaaccccaccccccctagtgcccccggcggcccgggagtggaatcttcccccaaatgcgcccgcctgcatggaacggcagttggaggctgcgcggtaccggtccgatggggcgcttctcctcggggcctccagcctgagtgggcgctgctgggccggctccctctggctttttaaggacccctgtgccgcccccaacgaaggcttctgctccgccggagtccaaacggaggctggagtggctgacctcacttgggttggggagagaggtattctagtggcctccgattcaggtgctgttgaattgtgggaactagatgagaatgagacacttattgtcagcaagttctgcaagtatgagcatgatgacattgtgtctacagtcagtgtcttgagctctggcacacaagctgtcagtggtagcaaagacatctgcatcaaggtttgggaccttgctcagcaggtggtactgagttcataccgagctcatgctgctcaggtcacttgtgttgctgcctctcctcacaaggactctgtgtttctttcatgcagcgaggacaatagaattttactctgggatacccgctgtcccaagccagcatcacagattggctgcagtgcgcctggctaccttcctacctcgctggcttggcatcctcagcaaagtgaagtctttgtctttggtgatgagaatgggacagtctcccttgtggacaccaagantacaagctgtgtcctgagctcagctgtacactcccagtgtgtcactgggctggtgttctcccccacacantgttnccttcctggcctctctcanngaaaantgctcactngctgtgctgnactcaanccnttttgaattttttaaaaccnancccaaaaaaacttntgnaaaaatgcnanttggtccccgctcantcactcctngntaacananngggntggnacnatcaggncnnccaccanttntgnccaaaaaacctcccccacccctggancngnanngtttntgaanaatggatttaaaaaaaaancannnccccananggncncttttttnccngncccccnnntggaaaanaanaganccttnaaaaanntnaaannnaaannngncnnnaaannnccccccccccnnnanngnnnttnnnttnttnntannnnaaaa

SEQ ID NO: 916 - DNA, 1391 bp, Homo Sapiens
  misc_feature (2)..(2): n is a, c, g, or t
  misc_feature (7)..(7): n is a, c, g, or t
  misc_feature (10)..(10): n is a, c, g, or t
  misc_feature (805)..(805): n is a, c, g, or t
  misc_feature (833)..(833): n is a, c, g, or t
  misc_feature (859)..(859): n is a, c, g, or t
  misc_feature (871)..(871): n is a, c, g, or t
  misc_feature (894)..(894): n is a, c, g, or t
  misc_feature (915)..(915): n is a, c, g, or t
  misc_feature (918)..(918): n is a, c, g, or t
  misc_feature (932)..(933): n is a, c, g, or t
  misc_feature (939)..(939): n is a, c, g, or t
  misc_feature (941)..(941): n is a, c, g, or t
  misc_feature (972)..(972): n is a, c, g, or t
  misc_feature (977)..(977): n is a, c, g, or t
  misc_feature (984)..(984): n is a, c, g, or t
  misc_feature (988)..(988): n is a, c, g, or t
  misc_feature (999)..(999): n is a, c, g, or t
  misc_feature (1004)..(1004): n is a, c, g, or t
  misc_feature (1016)..(1016): n is a, c, g, or t
  misc_feature (1045)..(1045): n is a, c, g, or t
  misc_feature (1054)..(1055): n is a, c, g, or t
  misc_feature (1057)..(1057): n is a, c, g, or t
  misc_feature (1059)..(1059): n is a, c, g, or t
  misc_feature (1074)..(1075): n is a, c, g, or t
  misc_feature (1082)..(1082): n is a, c, g, or t
  misc_feature (1086)..(1086): n is a, c, g, or t
  misc_feature (1089)..(1089): n is a, c, g, or t
  misc_feature (1094)..(1094): n is a, c, g, or t
  misc_feature (1103)..(1104): n is a, c, g, or t
  misc_feature (1108)..(1108): n is a, c, g, or t
  misc_feature (1123)..(1124): n is a, c, g, or t
  misc_feature (1134)..(1134): n is a, c, g, or t
  misc_feature (1140)..(1140): n is a, c, g, or t
  misc_feature (1143)..(1143): n is a, c, g, or t
  misc_feature (1148)..(1148): n is a, c, g, or t
  misc_feature (1152)..(1152): n is a, c, g, or t
  misc_feature (1156)..(1156): n is a, c, g, or t
  misc_feature (1158)..(1158): n is a, c, g, or t
  misc_feature (1163)..(1163): n is a, c, g, or t
  misc_feature (1165)..(1165): n is a, c, g, or t
  misc_feature (1171)..(1172): n is a, c, g, or t
  misc_feature (1178)..(1178): n is a, c, g, or t
  misc_feature (1182)..(1183): n is a, c, g, or t
  misc_feature (1185)..(1185): n is a, c, g, or t
  misc_feature (1187)..(1188): n is a, c, g, or t
  misc_feature (1190)..(1190): n is a, c, g, or t
  misc_feature (1197)..(1197): n is a, c, g, or t
  misc_feature (1215)..(1217): n is a, c, g, or t
  misc_feature (1220)..(1220): n is a, c, g, or t
  misc_feature (1226)..(1227): n is a, c, g, or t
  misc_feature (1232)..(1233): n is a, c, g, or t
  misc_feature (1235)..(1237): n is a, c, g, or t
  misc_feature (1239)..(1239): n is a, c, g, or t
  misc_feature (1241)..(1241): n is a, c, g, or t
  misc_feature (1245)..(1245): n is a, c, g, or t
  misc_feature (1249)..(1249): n is a, c, g, or t
  misc_feature (1255)..(1255): n is a, c, g, or t
  misc_feature (1262)..(1262): n is a, c, g, or t
  misc_feature (1267)..(1267): n is a, c, g, or t
  misc_feature (1272)..(1272): n is a, c, g, or t
  misc_feature (1276)..(1276): n is a, c, g, or t
  misc_feature (1280)..(1281): n is a, c, g, or t
  misc_feature (1286)..(1286): n is a, c, g, or t
  misc_feature (1289)..(1303): n is a, c, g, or t
  misc_feature (1305)..(1305): n is a, c, g, or t
  misc_feature (1308)..(1312): n is a, c, g, or t
  misc_feature (1314)..(1314): n is a, c, g, or t
  misc_feature (1316)..(1316): n is a, c, g, or t
  misc_feature (1320)..(1320): n is a, c, g, or t
  misc_feature (1323)..(1323): n is a, c, g, or t
  misc_feature (1327)..(1333): n is a, c, g, or t
  misc_feature (1335)..(1341): n is a, c, g, or t
  misc_feature (1344)..(1345): n is a, c, g, or t
  misc_feature (1347)..(1347): n is a, c, g, or t
  misc_feature (1353)..(1360): n is a, c, g, or t
  misc_feature (1365)..(1373): n is a, c, g, or t
  misc_feature (1379)..(1379): n is a, c, g, or t
  misc_feature (1381)..(1382): n is a, c, g, or t
  misc_feature (1386)..(1386): n is a, c, g, or t
  misc_feature (1388)..(1388): n is a, c, g, or t
antaganganaattaactatggagaggatcgcatcaccatcaccatcacggatcctatttaggtgacactatagaatcgtcgacccacgcgtccgccgtcttcttcgccttccgcatgcgcttctacgtggcctggattgccgccgagtgcggctgcattgccgccggctttggggcctaccccgtggccgccaaagcccgggccggaggcggccccaccctccaatgcccaccccccagcagtccggagaaggcggcttccttggagtatgactatgagaccatccgcaacatcgactgctacagcacagatttctgcgtgcgggtgcgcgatggcatgcggtactggaacatgacggtgcagtggtggctggcgcagtatatctacaagagcgcacctgcccgttcctatgtcctgcggagcgcctggaccatgctgctgagcgcctactggcacggcctccacccgggctactacctgagcttcctgaccatcccgctgtgcctggctgccgagggccggctggagtcagccctgcgggggcggctgagcccagggggccagaaggcctgggactgggtgcactggttcctgaagatgcgcgcctatgactacatgtgcatgggcttcgtgctgctctccttggccgacacccttcggtactgggcctccatctacttctgtatccacttcctggccctggcagccctggggctggggctggctttaggtgggggcagccccagccggcggaaggcagcatcccagcccaccagccttgccccggaaaagctccgggaggantaagctgtcacgacgctccctctgccanctggtcccgggaattctgtgaaccangctgctgtctcntccccaaaaaaaagtccttaacnttggaaaagggtcctggaaanaanttcctcttccccanntaaaananccttgcctgcaactgaaacaaacccgggggngttcntccctgncctntgcccaaaagncaacntccaatcctaanaaaaaatatttgtccaaaaaaaaaaatcnttggccccnngntncaacttttggggtanncaaaaanaaantgnccttnccccaaaannaaangggccccttgggcannggtttttggnaaaatnccnttttntttnaatncnaaaangngggtcnnaaattngggnnangnncntggaaanggaaaccccttccttggnnnttncccccnntttanncnnncncncaantttnaaattnaaaaaanaaaanttccntttnaaanngaaantannnnnnnnnnnnnnngnaannnnncntntttnttnaaannnnnnnannnnnnntgnncntttttnnnnnnnnaaaannnnnnnnnaatttncnnaaantnaaa

SEQ ID NO: 917 - DNA, 1200 bp, Homo Sapiens
  misc_feature (2)..(2): n is a, c, g, or t
  misc_feature (4)..(4): n is a, c, g, or t
  misc_feature (730)..(730): n is a, c, g, or t
  misc_feature (734)..(734): n is a, c, g, or t
  misc_feature (737)..(738): n is a, c, g, or t
  misc_feature (740)..(740): n is a, c, g, or t
  misc_feature (742)..(755): n is a, c, g, or t
  misc_feature (757)..(768): n is a, c, g, or t
  misc_feature (792)..(792): n is a, c, g, or t
  misc_feature (815)..(815): n is a, c, g, or t
  misc_feature (837)..(837): n is a, c, g, or t
  misc_feature (839)..(839): n is a, c, g, or t
  misc_feature (869)..(869): n is a, c, g, or t
  misc_feature (884)..(884): n is a, c, g, or t
  misc_feature (888)..(888): n is a, c, g, or t
  misc_feature (894)..(894): n is a, c, g, or t
  misc_feature (898)..(898): n is a, c, g, or t
  misc_feature (905)..(905): n is a, c, g, or t
  misc_feature (924)..(924): n is a, c, g, or t
  misc_feature (930)..(930): n is a, c, g, or t
  misc_feature (935)..(936): n is a, c, g, or t
  misc_feature (938)..(938): n is a, c, g, or t
  misc_feature (941)..(942): n is a, c, g, or t
  misc_feature (945)..(945): n is a, c, g, or t
  misc_feature (958)..(959): n is a, c, g, or t
  misc_feature (964)..(964): n is a, c, g, or t
  misc_feature (969)..(969): n is a, c, g, or t
  misc_feature (996)..(996): n is a, c, g, or t
  misc_feature (1018)..(1018): n is a, c, g, or t
  misc_feature (1022)..(1022): n is a, c, g, or t
  misc_feature (1055)..(1055): n is a, c, g, or t
  misc_feature (1061)..(1061): n is a, c, g, or t
  misc_feature (1066)..(1067): n is a, c, g, or t
  misc_feature (1069)..(1070): n is a, c, g, or t
  misc_feature (1073)..(1074): n is a, c, g, or t
  misc_feature (1078)..(1078): n is a, c, g, or t
  misc_feature (1080)..(1080): n is a, c, g, or t
  misc_feature (1084)..(1086): n is a, c, g, or t
  misc_feature (1098)..(1098): n is a, c, g, or t
  misc_feature (1105)..(1105): n is a, c, g, or t
  misc_feature (1109)..(1110): n is a, c, g, or t
  misc_feature (1112)..(1113): n is a, c, g, or t
  misc_feature (1117)..(1117): n is a, c, g, or t
  misc_feature (1128)..(1128): n is a, c, g, or t
  misc_feature (1130)..(1130): n is a, c, g, or t
  misc_feature (1137)..(1137): n is a, c, g, or t
  misc_feature (1158)..(1158): n is a, c, g, or t
  misc_feature (1165)..(1166): n is a, c, g, or t
  misc_feature (1169)..(1169): n is a, c, g, or t
  misc_feature (1182)..(1182): n is a, c, g, or t
  misc_feature (1187)..(1187): n is a, c, g, or t
antngagaaattactatgagaggatcgcatcaccatcaccatcacggatcctatttaggtgacactatagaatcgtcgacccacgcgtccgcccacgcgtccgcccacgcgtccgctgggaggtgcgctacgagccggacagcaaggcgttcggcgtgggcgtggcctaccgcagcctgggccgcttcgagcaactgggcaagacggccgcctcctggtgcctgcacgtcaacaattggctgcaggtcagcttcacggccaagcacgccaacaaggtcaaggtgctggacgcccccgtgcccgactgcctgggtgtgcactgtgacttccaccaaggcctcctgtccttctacaatgcccgcaccaaacaagtgctgcacactttcaagaccaggttcacacagccgctgctgcctgctttcacggtatggtgtggcagcttccaggtgacgacaggcctgcaggtccccagtgctgtgcgctgcctgcaaaagcgaggcagtgctaccagcagctccaacaccagcctcacctaggcccccaggcacccacccagctggggtgtttttgggggagtcgccgccaagcccaggctgctggagccaggcaccctcctctgtcacttgctgcttggagccttaactccagatgggggggtcaccaagagggagtgggcaccctggcgggccctctccccacctcacctcttaataaaggtcagacactgaanaacnaannanannnnnnnnnnnnnnannnnnnnnnnnnaaaaagggcggccgctccctatantgagtcgtattaagcttaattanctgaacttggactcctgttgananatccagtaatgacctcaaaactccatctgnatttgtttcaaaaangctncggttngccnccggggngttttttattggtgaaaancccaanctaanntnggnnaanattttttcaggannctaanggaancttaaaatgggaaaaaaaaaaaattcnctgggaaattacccccggtttnaaanttccccaatgggcattctaaaaaaaaatttttnaagggnatttnnanncannttgncncaannntaccttaaaaancaaaacngttnnanntggnaaaattaaggncnttttttnaaaaaacggtaaaaaaaaaanaaaaccnnaantttttttccgggnctttnttttaaaattttt

SEQ ID NO: 918 - DNA, 1471 bp, Homo Sapiens
  misc_feature (810)..(810): n is a, c, g, or t
  misc_feature (813)..(813): n is a, c, g, or t
  misc_feature (817)..(817): n is a, c, g, or t
  misc_feature (820)..(820): n is a, c, g, or t
  misc_feature (829)..(829): n is a, c, g, or t
  misc_feature (845)..(845): n is a, c, g, or t
  misc_feature (848)..(848): n is a, c, g, or t
  misc_feature (864)..(864): n is a, c, g, or t
  misc_feature (870)..(870): n is a, c, g, or t
  misc_feature (876)..(876): n is a, c, g, or t
  misc_feature (908)..(908): n is a, c, g, or t
  misc_feature (929)..(929): n is a, c, g, or t
  misc_feature (933)..(933): n is a, c, g, or t
  misc_feature (944)..(944): n is a, c, g, or t
  misc_feature (946)..(946): n is a, c, g, or t
  misc_feature (948)..(949): n is a, c, g, or t
  misc_feature (951)..(952): n is a, c, g, or t
  misc_feature (960)..(960): n is a, c, g, or t
  misc_feature (977)..(977): n is a, c, g, or t
  misc_feature (980)..(980): n is a, c, g, or t
  misc_feature (983)..(983): n is a, c, g, or t
  misc_feature (985)..(985): n is a, c, g, or t
  misc_feature (990)..(990): n is a, c, g, or t
  misc_feature (993)..(993): n is a, c, g, or t
  misc_feature (998)..(998): n is a, c, g, or t
  misc_feature (1001)..(1002): n is a, c, g, or t
  misc_feature (1013)..(1016): n is a, c, g, or t
  misc_feature (1019)..(1019): n is a, c, g, or t
  misc_feature (1021)..(1022): n is a, c, g, or t
  misc_feature (1026)..(1026): n is a, c, g, or t
  misc_feature (1028)..(1028): n is a, c, g, or t
  misc_feature (1038)..(1039): n is a, c, g, or t
  misc_feature (1043)..(1043): n is a, c, g, or t
  misc_feature (1045)..(1045): n is a, c, g, or t
  misc_feature (1048)..(1048): n is a, c, g, or t
  misc_feature (1052)..(1052): n is a, c, g, or t
  misc_feature (1059)..(1059): n is a, c, g, or t
  misc_feature (1061)..(1061): n is a, c, g, or t
  misc_feature (1064)..(1064): n is a, c, g, or t
  misc_feature (1073)..(1073): n is a, c, g, or t
  misc_feature (1080)..(1080): n is a, c, g, or t
  misc_feature (1082)..(1082): n is a, c, g, or t
  misc_feature (1085)..(1085): n is a, c, g, or t
  misc_feature (1087)..(1087): n is a, c, g, or t
  misc_feature (1089)..(1090): n is a, c, g, or t
  misc_feature (1093)..(1094): n is a, c, g, or t
  misc_feature (1097)..(1098): n is a, c, g, or t
  misc_feature (1111)..(1111): n is a, c, g, or t
  misc_feature (1114)..(1114): n is a, c, g, or t
  misc_feature (1117)..(1117): n is a, c, g, or t
  misc_feature (1122)..(1122): n is a, c, g, or t
  misc_feature (1124)..(1124): n is a, c, g, or t
  misc_feature (1130)..(1131): n is a, c, g, or t
  misc_feature (1137)..(1137): n is a, c, g, or t
  misc_feature (1139)..(1139): n is a, c, g, or t
  misc_feature (1141)..(1142): n is a, c, g, or t
  misc_feature (1144)..(1144): n is a, c, g, or t
  misc_feature (1151)..(1151): n is a, c, g, or t
  misc_feature (1153)..(1155): n is a, c, g, or t
  misc_feature (1157)..(1157): n is a, c, g, or t
  misc_feature (1162)..(1162): n is a, c, g, or t
  misc_feature (1165)..(1165): n is a, c, g, or t
  misc_feature (1170)..(1170): n is a, c, g, or t
  misc_feature (1175)..(1175): n is a, c, g, or t
  misc_feature (1177)..(1177): n is a, c, g, or t
  misc_feature (1181)..(1181): n is a, c, g, or t
  misc_feature (1184)..(1184): n is a, c, g, or t
  misc_feature (1188)..(1188): n is a, c, g, or t
  misc_feature (1196)..(1196): n is a, c, g, or t
  misc_feature (1199)..(1199): n is a, c, g, or t
  misc_feature (1203)..(1203): n is a, c, g, or t
  misc_feature (1205)..(1205): n is a, c, g, or t
  misc_feature (1207)..(1207): n is a, c, g, or t
  misc_feature (1210)..(1210): n is a, c, g, or t
  misc_feature (1212)..(1212): n is a, c, g, or t
  misc_feature (1215)..(1216): n is a, c, g, or t
  misc_feature (1218)..(1220): n is a, c, g, or t
  misc_feature (1226)..(1228): n is a, c, g, or t
  misc_feature (1232)..(1232): n is a, c, g, or t
  misc_feature (1235)..(1235): n is a, c, g, or t
  misc_feature (1239)..(1240): n is a, c, g, or t
  misc_feature (1245)..(1247): n is a, c, g, or t
  misc_feature (1252)..(1252): n is a, c, g, or t
  misc_feature (1257)..(1258): n is a, c, g, or t
  misc_feature (1262)..(1262): n is a, c, g, or t
  misc_feature (1268)..(1268): n is a, c, g, or t
  misc_feature (1270)..(1271): n is a, c, g, or t
  misc_feature (1274)..(1274): n is a, c, g, or t
  misc_feature (1278)..(1278): n is a, c, g, or t
  misc_feature (1281)..(1281): n is a, c, g, or t
  misc_feature (1284)..(1285): n is a, c, g, or t
  misc_feature (1289)..(1291): n is a, c, g, or t
  misc_feature (1293)..(1293): n is a, c, g, or t
  misc_feature (1295)..(1295): n is a, c, g, or t
  misc_feature (1300)..(1300): n is a, c, g, or t
  misc_feature (1303)..(1304): n is a, c, g, or t
  misc_feature (1310)..(1314): n is a, c, g, or t
  misc_feature (1316)..(1316): n is a, c, g, or t
  misc_feature (1318)..(1319): n is a, c, g, or t
  misc_feature (1321)..(1321): n is a, c, g, or t
  misc_feature (1336)..(1336): n is a, c, g, or t
  misc_feature (1339)..(1339): n is a, c, g, or t
  misc_feature (1341)..(1341): n is a, c, g, or t
  misc_feature (1348)..(1348): n is a, c, g, or t
  misc_feature (1356)..(1356): n is a, c, g, or t
  misc_feature (1361)..(1361): n is a, c, g, or t
  misc_feature (1364)..(1364): n is a, c, g, or t
  misc_feature (1366)..(1366): n is a, c, g, or t
  misc_feature (1375)..(1375): n is a, c, g, or t
  misc_feature (1377)..(1378): n is a, c, g, or t
  misc_feature (1382)..(1382): n is a, c, g, or t
  misc_feature (1392)..(1392): n is a, c, g, or t
  misc_feature (1395)..(1395): n is a, c, g, or t
  misc_feature (1399)..(1399): n is a, c, g, or t
  misc_feature (1403)..(1403): n is a, c, g, or t
  misc_feature (1409)..(1409): n is a, c, g, or t
  misc_feature (1421)..(1422): n is a, c, g, or t
  misc_feature (1424)..(1424): n is a, c, g, or t
  misc_feature (1426)..(1426): n is a, c, g, or t
  misc_feature (1428)..(1428): n is a, c, g, or t
  misc_feature (1434)..(1434): n is a, c, g, or t
  misc_feature (1440)..(1441): n is a, c, g, or t
  misc_feature (1444)..(1444): n is a, c, g, or t
  misc_feature (1446)..(1446): n is a, c, g, or t
  misc_feature (1453)..(1453): n is a, c, g, or t
  misc_feature (1457)..(1457): n is a, c, g, or t
  misc_feature (1461)..(1461): n is a, c, g, or t
  misc_feature (1466)..(1466): n is a, c, g, or t
  misc_feature (1468)..(1468): n is a, c, g, or t
  misc_feature (1471)..(1471): n is a, c, g, or t
atagagaaattactatgagaggatcgcatcaccatcaccatcacggatcctatttaggtgacactatagaatcgtcgacccacgcgtccggcaaaaacttcgaccgagagattggccacaataaccccagtgccatggcagtggagtcattcacggcaacagccccctttgtccaaattggcaggtttttcctctcgtcaggcctcatcgacaaagtcgacaacttcaagtccctgagcctatccaagctggaggaccctcatgtggacatcattcgccgtggagactttttctaccacagcgaaaatcccaagtatccagaggtgggagacttgcgtgtctccttttcctatgctggactgagcggcgatgaccctgacctgggcccagctcacgtggtcactgtgattgcccggcagcggggtgaccagctagtcccattctccaccaagtctggggataccttactgctcctgcaccacggggacttctcagcagaggaggtgtttcatagagaactaaggagcaactccatgaagacctggggcctgcgggcagctggctggatggccatgttcatgggcctcaaccttatgacacggatcctctacaccttggtggactggtttcctgttttccgagacctggtcaacattggcctgaaagcctttgccttctgtgtggccacctcgctgaccctgctgaccgtggcggctggctggctcttctaccgacccctgtgggcccctcctcattgccggcctggccccttgtgcccatccttgttgctcggaacacgggtgccagccnaanaagntgnagtgaaaanacccttggcaccccgnccnaaaacctggcgtgaanccctangaatcnaggtcccttctcttcacctcctgaccccagtnccatgccaaaccaggaacccncggntcaattttggnantnngnnaccccctnctcctttttctgggggnaanaantngcaanccngtgcncanngttgggtgttnnnncancnnattntncttccccaannctcntnatngcanaaaaatnanttntggtggggngacccancnctntnannggnnaanncaaaaccttcccnggnagnttccntnccctcnntggaangnanngngtatagncnnncnctcanccntgtgnaattnanatantcnaaantcctcctnacnaacntntntananaanntnnnccctannngagnatntttnntaatnnnttcanaaaanncctntatttnanntanctanaantanntatnnntnanaggcngannaatttnnnnntntnncnagctacacataacantgntnaaaccanatatagcnagccnaananatttaatananngatngtataaaaanaanctcnaatnataganaatgaatatcannantnantcattnatacannatntnagtgaanatanatantattntnatn

SEQ ID NO: 919 - DNA, 1200 bp, Homo Sapiens
  misc_feature (1)..(1): n is a, c, g, or t
  misc_feature (4)..(4): n is a, c, g, or t
  misc_feature (822)..(822): n is a, c, g, or t
  misc_feature (881)..(881): n is a, c, g, or t
  misc_feature (889)..(889): n is a, c, g, or t
  misc_feature (966)..(966): n is a, c, g, or t
  misc_feature (988)..(988): n is a, c, g, or t
  misc_feature (1018)..(1018): n is a, c, g, or t
  misc_feature (1026)..(1026): n is a, c, g, or t
  misc_feature (1036)..(1037): n is a, c, g, or t
  misc_feature (1041)..(1085): n is a, c, g, or t
  misc_feature (1088)..(1088): n is a, c, g, or t
  misc_feature (1102)..(1102): n is a, c, g, or t
  misc_feature (1105)..(1105): n is a, c, g, or t
  misc_feature (1109)..(1109): n is a, c, g, or t
  misc_feature (1123)..(1127): n is a, c, g, or t
  misc_feature (1130)..(1130): n is a, c, g, or t
  misc_feature (1132)..(1132): n is a, c, g, or t
  misc_feature (1134)..(1134): n is a, c, g, or t
  misc_feature (1136)..(1137): n is a, c, g, or t
  misc_feature (1140)..(1140): n is a, c, g, or t
  misc_feature (1144)..(1144): n is a, c, g, or t
  misc_feature (1153)..(1154): n is a, c, g, or t
  misc_feature (1157)..(1157): n is a, c, g, or t
  misc_feature (1159)..(1159): n is a, c, g, or t
  misc_feature (1163)..(1163): n is a, c, g, or t
  misc_feature (1171)..(1171): n is a, c, g, or t
  misc_feature (1173)..(1173): n is a, c, g, or t
  misc_feature (1183)..(1183): n is a, c, g, or t
  misc_feature (1190)..(1191): n is a, c, g, or t
  misc_feature (1193)..(1193): n is a, c, g, or t
  misc_feature (1195)..(1195): n is a, c, g, or t
ntantagagaaattactatgagaggatcgcatcaccatcaccatcacggatcctatttaggtgacactatagaatcgtcgacccacgcgtccggggaagagtggtgtgggcaagacggcgctggtggccaagctggctggcctggaggtgcctgtggtgcaccacgagaccaccggcatccagaccaccgtggtattttggccagccaagctgcaggccagcagccgtgtcgtcatgtttcgttttgagttctgggactgtggagagtctgcactcaaaaagttcgatcatatgctgctggcttgcatggagaacacagatgccttcctcttcctcttctccttcactgaccgtgcctcctttgaagacctccctggacagctggcccgcatagcaggtgaggcccctggtgtcgtcaggatggtcatcggctccaaatttgaccagtacatgcacacggacgtgcccgagcgggacctcacagccttccggcaggcctgggagctgcccctgctacgggtgaagagtgtgccggggcggcggctggctgatgggcgcacactggacgggcgggctgggctggccgacgttgcccacatactcaatggccttgctgagcagctgtggcaccaggaccaggtggcggctggcctgcttcccaaccccccagagagtgctcctgaatgagtcacgagtggttgcctgtgatcccacccccaaccctcaggtctcgacatagggctggaggctggggcaggaacatggatcctatctggaggactggccagcatggcctgatcagggaggatgtggccagaaaangcccacccgcgagcagcgctttccttgcaaaattcatggcagggaggtggggaaccaangccctganctcgaacatctcccgtggcctttccccctttggcagcaccgatgaagatgactgggaaaaggggtgcctctcaagtnacttcaatcaaaaacctgtatnggttgaggtgaaaccatctgttgtaaaaanaaaccccnaattcccaannaaannnnnnnnnnnnnnnnnnnnnnnnnnnnnnnnnnnnnnnnnnnnnggnggccccccccaaanggngccnaataaacttaattnnnnnaantngnannccngttnaaaaatccnnaangncccnaaaccccncnggattttttnaaaaccnngntnccccc

SEQ ID NO: 920 - DNA, 1433 bp, Homo Sapiens
  misc_feature (766)..(766): n is a, c, g, or t
  misc_feature (814)..(814): n is a, c, g, or t
  misc_feature (863)..(863): n is a, c, g, or t
  misc_feature (882)..(882): n is a, c, g, or t
  misc_feature (907)..(907): n is a, c, g, or t
  misc_feature (915)..(915): n is a, c, g, or t
  misc_feature (937)..(937): n is a, c, g, or t
  misc_feature (947)..(947): n is a, c, g, or t
  misc_feature (950)..(950): n is a, c, g, or t
  misc_feature (957)..(957): n is a, c, g, or t
  misc_feature (964)..(964): n is a, c, g, or t
  misc_feature (971)..(971): n is a, c, g, or t
  misc_feature (981)..(981): n is a, c, g, or t
  misc_feature (985)..(985): n is a, c, g, or t
  misc_feature (996)..(996): n is a, c, g, or t
  misc_feature (1003)..(1003): n is a, c, g, or t
  misc_feature (1007)..(1007): n is a, c, g, or t
  misc_feature (1009)..(1009): n is a, c, g, or t
  misc_feature (1021)..(1021): n is a, c, g, or t
  misc_feature (1029)..(1029): n is a, c, g, or t
  misc_feature (1038)..(1038): n is a, c, g, or t
  misc_feature (1046)..(1047): n is a, c, g, or t
  misc_feature (1053)..(1053): n is a, c, g, or t
  misc_feature (1063)..(1063): n is a, c, g, or t
  misc_feature (1071)..(1071): n is a, c, g, or t
  misc_feature (1074)..(1074): n is a, c, g, or t
  misc_feature (1088)..(1088): n is a, c, g, or t
  misc_feature (1094)..(1094): n is a, c, g, or t
  misc_feature (1099)..(1099): n is a, c, g, or t
  misc_feature (1117)..(1118): n is a, c, g, or t
  misc_feature (1120)..(1120): n is a, c, g, or t
  misc_feature (1124)..(1125): n is a, c, g, or t
  misc_feature (1132)..(1132): n is a, c, g, or t
  misc_feature (1134)..(1134): n is a, c, g, or t
  misc_feature (1137)..(1137): n is a, c, g, or t
  misc_feature (1140)..(1140): n is a, c, g, or t
  misc_feature (1145)..(1145): n is a, c, g, or t
  misc_feature (1156)..(1156): n is a, c, g, or t
  misc_feature (1166)..(1167): n is a, c, g, or t
  misc_feature (1170)..(1170): n is a, c, g, or t
  misc_feature (1174)..(1174): n is a, c, g, or t
  misc_feature (1181)..(1182): n is a, c, g, or t
  misc_feature (1188)..(1188): n is a, c, g, or t
  misc_feature (1193)..(1193): n is a, c, g, or t
  misc_feature (1195)..(1195): n is a, c, g, or t
  misc_feature (1206)..(1206): n is a, c, g, or t
  misc_feature (1208)..(1208): n is a, c, g, or t
  misc_feature (1210)..(1212): n is a, c, g, or t
  misc_feature (1214)..(1214): n is a, c, g, or t
  misc_feature (1218)..(1219): n is a, c, g, or t
  misc_feature (1223)..(1223): n is a, c, g, or t
  misc_feature (1235)..(1235): n is a, c, g, or t
  misc_feature (1240)..(1240): n is a, c, g, or t
  misc_feature (1243)..(1243): n is a, c, g, or t
  misc_feature (1248)..(1249): n is a, c, g, or t
  misc_feature (1252)..(1252): n is a, c, g, or t
  misc_feature (1262)..(1262): n is a, c, g, or t
  misc_feature (1277)..(1277): n is a, c, g, or t
  misc_feature (1279)..(1279): n is a, c, g, or t
  misc_feature (1282)..(1284): n is a, c, g, or t
  misc_feature (1286)..(1286): n is a, c, g, or t
  misc_feature (1288)..(1288): n is a, c, g, or t
  misc_feature (1290)..(1293): n is a, c, g, or t
  misc_feature (1295)..(1297): n is a, c, g, or t
  misc_feature (1301)..(1302): n is a, c, g, or t
  misc_feature (1304)..(1304): n is a, c, g, or t
  misc_feature (1308)..(1308): n is a, c, g, or t
  misc_feature (1310)..(1310): n is a, c, g, or t
  misc_feature (1314)..(1314): n is a, c, g, or t
  misc_feature (1326)..(1329): n is a, c, g, or t
  misc_feature (1331)..(1335): n is a, c, g, or t
  misc_feature (1340)..(1343): n is a, c, g, or t
  misc_feature (1347)..(1350): n is a, c, g, or t
  misc_feature (1356)..(1356): n is a, c, g, or t
  misc_feature (1360)..(1360): n is a, c, g, or t
  misc_feature (1362)..(1362): n is a, c, g, or t
  misc_feature (1365)..(1366): n is a, c, g, or t
  misc_feature (1368)..(1368): n is a, c, g, or t
  misc_feature (1372)..(1373): n is a, c, g, or t
  misc_feature (1376)..(1376): n is a, c, g, or t
  misc_feature (1381)..(1382): n is a, c, g, or t
  misc_feature (1389)..(1390): n is a, c, g, or t
  misc_feature (1392)..(1392): n is a, c, g, or t
  misc_feature (1395)..(1398): n is a, c, g, or t
  misc_feature (1400)..(1411): n is a, c, g, or t
  misc_feature (1413)..(1415): n is a, c, g, or t
  misc_feature (1417)..(1417): n is a, c, g, or t
  misc_feature (1423)..(1426): n is a, c, g, or t
  misc_feature (1428)..(1428): n is a, c, g, or t
  misc_feature (1430)..(1431): n is a, c, g, or t
  misc_feature (1433)..(1433): n is a, c, g, or t
tagagaattactatgagaggatcgcatcaccatcaccatcacggatcctatttaggtgacactatagaatcgtcgacccacgcgtccgcccacgcgtccgcccacgcgtccgctctgctgcggcgcggggaccgctgtgctctcgacccctcctcctgtagagagtggtgctgccctctcgggatgtacctgcaggtggagacccgcaccagctcccgcctccatctgaagagggctccaggcatccggtcctggtccctgctggttggaatcttgtcgattggcctggctgctgcctactacagcggagatagcctgggctggaagctcttctacgtcacaggctgcctgtttgtggctgtgcagaacttggaggactgggaggaagccatcttcgacaagagcacagggaaggttgttttgaagacgttcagcctctacaagaagctgctgactcttttcagagctggccacgaccaggtggtggtcctgctccatgatgtccgtgatgtgagcgtggaggaggagaaggtccggtacttcgggaaaggctacatggtggtgctccggcttgcgacgggcttctcccaccccctcacgcagagtgcagtcatgggccaccgcagtgatgtggaagccatcgccaagctcatcaccagcttcctggagctgcactgccttgagagccccacagagctgtctcagagcagcgacagtgaggccggtgaccctgcaagccagagctgacagccccactgtgcctgancccgtgcaccgcccacaggacccatggcacattcccggtgtgcctgancccgtgcaccgcccacaggaacccgtggcacattcccggtgtgcctgancccgtgcaccgcccacagnaaccgtggcacatttccggggtgcntgaacccngtgcaccgccccacaggaaccngtggcaaatnccngtgtgcntgaaccngtgcacnccccaagganccgnggccttggctncattggngccncnaccaaatggccnattgccgntcaagctgntgcttgcnnctggangaaaaaaccnggccaaancanaaatccaaaatttntccacngaagnctgggcctgcctttttcnncnggannttccccnanccntgnaattntgctttgggcnaaaaaaaccnnggnaaanggaaaanngggccnagccngncccttgggggntnannngnagtnncccnaaaaatccttcntgggnaanccccnnggnagggttcccngggggggggggaaancnggnnntngntnnnncnnnccanngnaaancncccnaaaccccttttnnnnannnnnaaaannnncccnnnnaaaaantttntnccnntntaannggnaaaannttttttnntnaannnncnnnnnnnnnnnntnnngngggggnnnnancnnan

SEQ ID NO: 921 - DNA, 1200 bp, Homo Sapiens
  misc_feature (801)..(801): n is a, c, g, or t
  misc_feature (994)..(994): n is a, c, g, or t
  misc_feature (1021)..(1021): n is a, c, g, or t
  misc_feature (1033)..(1034): n is a, c, g, or t
  misc_feature (1036)..(1036): n is a, c, g, or t
  misc_feature (1038)..(1038): n is a, c, g, or t
  misc_feature (1043)..(1043): n is a, c, g, or t
  misc_feature (1045)..(1045): n is a, c, g, or t
  misc_feature (1053)..(1053): n is a, c, g, or t
  misc_feature (1055)..(1055): n is a, c, g, or t
  misc_feature (1081)..(1081): n is a, c, g, or t
  misc_feature (1103)..(1103): n is a, c, g, or t
  misc_feature (1108)..(1108): n is a, c, g, or t
  misc_feature (1110)..(1111): n is a, c, g, or t
  misc_feature (1116)..(1116): n is a, c, g, or t
  misc_feature (1122)..(1122): n is a, c, g, or t
  misc_feature (1127)..(1127): n is a, c, g, or t
  misc_feature (1133)..(1134): n is a, c, g, or t
  misc_feature (1140)..(1140): n is a, c, g, or t
  misc_feature (1143)..(1143): n is a, c, g, or t
  misc_feature (1154)..(1154): n is a, c, g, or t
  misc_feature (1159)..(1159): n is a, c, g, or t
  misc_feature (1161)..(1161): n is a, c, g, or t
  misc_feature (1165)..(1165): n is a, c, g, or t
  misc_feature (1167)..(1167): n is a, c, g, or t
  misc_feature (1171)..(1171): n is a, c, g, or t
  misc_feature (1173)..(1175): n is a, c, g, or t
  misc_feature (1177)..(1177): n is a, c, g, or t
  misc_feature (1182)..(1182): n is a, c, g, or t
  misc_feature (1187)..(1187): n is a, c, g, or t
  misc_feature (1191)..(1193): n is a, c, g, or t
tagagaaattaactatgagaggatcgcatcaccatcaccatcacggatcctatttaggtgacactatagaatcgtcgacccacgcgtccgccgtgctctgggccggcgccttcaccatggcctcggcagagctggactacaccatcgagatcccggatcagccctgctggagccagaagaacagccccagcccaggtgggaaggaggcagaaactcggcagcctgtggtgattctcttgggctggggtggctgcaaggacaagaaccttgccaagtacagtgccatctaccacaaaaggggctgcatcgtaatccgatacacagccccgtggcacatggtcttcttctccgagtcactgggtatcccttcacttcgtgttttggcccagaagctgctcgagctgctctttgattatgagattgagaaggagcccctgctcttccatgtcttcagcaacggtggcgtcatgctgtaccgctacgtgctggagctcctgcagacccgtcgcttctgccgcctgcgtgtggtgggcaccatctttgacagcgctcctggtgacagcaacctggtaggggctctgcgggccctggcagccatcctggagcgccgggccgccatgctgcgcctgttgctgctggtggcctttgccctggtggtcgtcctgttccacgtcctgcttgctcccatcacagccctcttccacacccacttctatgacaggctacaggacgcgggctctcgctggcccgagctctacctctactcgagggctgacgaagtagtcctggccagagacatanaacgcatggtggaggcacgcctggcacgccgggtcctggcgcgttctgtggatttcgtgtcatctgcacacgtcagccacctccgtgactaccctacttactacacaagcctctgtgtcgacttcatgcgcaactgcgtccgctgctgaagccattgctccatctcacctctgctccaaaaaaaatgcctganacctcccaaacctgcaatctgtcgggnactcttctcgtnnantncctgnancctttggnanttgcggtccctaaataaaaattctangggcctgtttcctggggcctcngttcngnnggggnctgctnaccanaaatcnnaagggnaanaatgctgggcntgttntngggnancttncnnncnttttntttgnaaannnaaaatca

SEQ ID NO: 922 - DNA, 1200 bp, Homo Sapiens
  misc_feature (969)..(969): n is a, c, g, or t
  misc_feature (972)..(972): n is a, c, g, or t
  misc_feature (978)..(978): n is a, c, g, or t
  misc_feature (980)..(980): n is a, c, g, or t
  misc_feature (997)..(997): n is a, c, g, or t
  misc_feature (1002)..(1002): n is a, c, g, or t
  misc_feature (1022)..(1022): n is a, c, g, or t
  misc_feature (1040)..(1040): n is a, c, g, or t
  misc_feature (1042)..(1042): n is a, c, g, or t
  misc_feature (1055)..(1055): n is a, c, g, or t
  misc_feature (1088)..(1088): n is a, c, g, or t
  misc_feature (1097)..(1097): n is a, c, g, or t
  misc_feature (1106)..(1106): n is a, c, g, or t
  misc_feature (1119)..(1119): n is a, c, g, or t
  misc_feature (1123)..(1123): n is a, c, g, or t
  misc_feature (1140)..(1140): n is a, c, g, or t
  misc_feature (1145)..(1145): n is a, c, g, or t
  misc_feature (1148)..(1149): n is a, c, g, or t
  misc_feature (1153)..(1154): n is a, c, g, or t
  misc_feature (1158)..(1160): n is a, c, g, or t
  misc_feature (1166)..(1166): n is a, c, g, or t
  misc_feature (1170)..(1170): n is a, c, g, or t
  misc_feature (1186)..(1186): n is a, c, g, or t
  misc_feature (1189)..(1190): n is a, c, g, or t
  misc_feature (1195)..(1195): n is a, c, g, or t
agagagaattactatgagaggatcgcatcaccatcaccatcacggatcctatttaggtgacactatagaatcgtcgacccacgcgtccgccctgcgcggcatggaggggacggccgtggccgtgttcgagattttgagatttttaataattcactggaagtgtgacatagatgtatcaaagggagcattgctagaagggcagctagtgatttccatagaaggattaaattctaagcaccaggcaaatgctcttcattgtgtaacaactattgcttctgcaggaagcctttttggtggcatggtcctcaagaagttcctaaaagttccagctcccaaactccagacatcttaggaagggttttatgcttctggattttcctttcctcctgaatttcatcactcaggaaatcaatcaaagctttgtctccttcgcacgccacacccacagccggaggtgcagggcccgcgaggccgcagggggcccggccgcagaacacgcgcgcaaactgagcagcctgaagggcgggcgcacagccggggcgccggccaggagctgccggaaaggcggggcgggccccgggggtgtggaagccggcgacgcagaagcccagcatatggggcactcagcgcagcagtggcagcatggcggagaggactgcgaacatgtgcggatgcaaaggacaacccaggcctagagacagtctcaaactcctgggctcaagtgattctcctgcctcagcctcccaaattgctgggattacagacttgagccactgcacccagccttctccatgtctttagggacaaacttctaggatgaaatttaggatgaattaagtcattagcttgacaccatgatgtacaaatccctgaatttcagtttcattgttaaaatgccattgtttcaagatgctcagttggctatggaaagataggtcatctatcccagctactcagggggatcttttngancccaanangtcaaggctacagtganctgcnatcacagcactgcactctancccgggcaacaaagtganantgtctccaaaaanaaaataaaaatttatatgggaaaaaaaaccccnaaaaacccncccctattnaaaaaaaaagtcngggnatgggcctacctgactncaaanttnnaaannctannnaatttncccnagggaattaaaaaatncanngcccncccct

SEQ ID NO: 923 - DNA, 1394 bp, Homo Sapiens
  misc_feature (1)..(2): n is a, c, g, or t
  misc_feature (7)..(7): n is a, c, g, or t
  misc_feature (11)..(11): n is a, c, g, or t
  misc_feature (15)..(16): n is a, c, g, or t
  misc_feature (24)..(24): n is a, c, g, or t
  misc_feature (60)..(60): n is a, c, g, or t
  misc_feature (771)..(771): n is a, c, g, or t
  misc_feature (775)..(775): n is a, c, g, or t
  misc_feature (778)..(778): n is a, c, g, or t
  misc_feature (849)..(849): n is a, c, g, or t
  misc_feature (856)..(856): n is a, c, g, or t
  misc_feature (866)..(866): n is a, c, g, or t
  misc_feature (879)..(879): n is a, c, g, or t
  misc_feature (892)..(892): n is a, c, g, or t
  misc_feature (895)..(895): n is a, c, g, or t
  misc_feature (934)..(935): n is a, c, g, or t
  misc_feature (939)..(939): n is a, c, g, or t
  misc_feature (961)..(962): n is a, c, g, or t
  misc_feature (973)..(973): n is a, c, g, or t
  misc_feature (979)..(979): n is a, c, g, or t
  misc_feature (986)..(986): n is a, c, g, or t
  misc_feature (993)..(993): n is a, c, g, or t
  misc_feature (1001)..(1002): n is a, c, g, or t
  misc_feature (1012)..(1012): n is a, c, g, or t
  misc_feature (1015)..(1016): n is a, c, g, or t
  misc_feature (1027)..(1027): n is a, c, g, or t
  misc_feature (1030)..(1030): n is a, c, g, or t
  misc_feature (1032)..(1032): n is a, c, g, or t
  misc_feature (1042)..(1043): n is a, c, g, or t
  misc_feature (1051)..(1052): n is a, c, g, or t
  misc_feature (1055)..(1055): n is a, c, g, or t
  misc_feature (1063)..(1063): n is a, c, g, or t
  misc_feature (1068)..(1068): n is a, c, g, or t
  misc_feature (1075)..(1075): n is a, c, g, or t
  misc_feature (1088)..(1088): n is a, c, g, or t
  misc_feature (1090)..(1091): n is a, c, g, or t
  misc_feature (1103)..(1103): n is a, c, g, or t
  misc_feature (1109)..(1109): n is a, c, g, or t
  misc_feature (1121)..(1121): n is a, c, g, or t
  misc_feature (1130)..(1130): n is a, c, g, or t
  misc_feature (1133)..(1133): n is a, c, g, or t
  misc_feature (1147)..(1147): n is a, c, g, or t
  misc_feature (1157)..(1158): n is a, c, g, or t
  misc_feature (1173)..(1174): n is a, c, g, or t
  misc_feature (1185)..(1186): n is a, c, g, or t
  misc_feature (1190)..(1190): n is a, c, g, or t
  misc_feature (1195)..(1195): n is a, c, g, or t
  misc_feature (1197)..(1197): n is a, c, g, or t
  misc_feature (1199)..(1199): n is a, c, g, or t
  misc_feature (1202)..(1202): n is a, c, g, or t
  misc_feature (1204)..(1205): n is a, c, g, or t
  misc_feature (1212)..(1212): n is a, c, g, or t
  misc_feature (1218)..(1218): n is a, c, g, or t
  misc_feature (1220)..(1220): n is a, c, g, or t
  misc_feature (1242)..(1242): n is a, c, g, or t
  misc_feature (1252)..(1252): n is a, c, g, or t
  misc_feature (1265)..(1265): n is a, c, g, or t
  misc_feature (1269)..(1269): n is a, c, g, or t
  misc_feature (1271)..(1271): n is a, c, g, or t
  misc_feature (1276)..(1276): n is a, c, g, or t
  misc_feature (1291)..(1291): n is a, c, g, or t
  misc_feature (1305)..(1305): n is a, c, g, or t
  misc_feature (1314)..(1314): n is a, c, g, or t
  misc_feature (1322)..(1322): n is a, c, g, or t
  misc_feature (1335)..(1335): n is a, c, g, or t
  misc_feature (1344)..(1344): n is a, c, g, or t
  misc_feature (1354)..(1355): n is a, c, g, or t
  misc_feature (1360)..(1363): n is a, c, g, or t
  misc_feature (1367)..(1368): n is a, c, g, or t
  misc_feature (1370)..(1370): n is a, c, g, or t
  misc_feature (1373)..(1373): n is a, c, g, or t
  misc_feature (1375)..(1377): n is a, c, g, or t
  misc_feature (1381)..(1381): n is a, c, g, or t
  misc_feature (1383)..(1383): n is a, c, g, or t
  misc_feature (1394)..(1394): n is a, c, g, or t
nntaganaganttanntatgagangatcgcatcaccatcaccatcacggatcctatttantgtgacactatagaatcgtcgacccacgcgatccggctgcagtggcggaggctgggggctgtacccccacaggcctgcatctgcctccacggctcccaccatcctctgcgcccaggcatggtgggcagccccgagggtggcaggtagacctgtctcttcccacttactgcggccccgcccctaccacaggcagaagctgaccctgcttaaagagatgctggcgggctgtggggctggcacctgccaggtgatcgtgaccacgcccatggagatgctgaagatccagctgcaggatgcagggcgcattgccgcccagaggaagatcctggctgcccagggccaggtctcggcccaggggggtgcccagccctcagtggaggctccagctgcccctcggcccacggccacccagctgacccgcgacctgctgcggagccgtggcattgccggtctctacaagggactcggggccacgctgctcagggatgtccccttctctgtggtgtacttcccgctctttgccaacctgaaccagctgggccgcccggcgtccgaggagaagtcgcctttctacgtgtccttcctggccggctgtgtggctgggagtgccgccgctgtggccgtcaacccctgtgatgtggtgaagacgcggctccagtcacttcagcgaggcgtcaacgaggacacctactctgggatcctggactgtgncagnaanatcctgcggcacgagggcccctcggccttcctgaaaggcgcctactgccgcgcgctggtcatcgcgccccnttttcgncatcgcacangtggtctacttcntgggcattcgcgnaantccctgctggggctgctgcaagaaccccccaggcctgannccancacccgcttcaaccccaaccannttgggcaaggnccggtnttggggnttggaanccaagcannttaccccaanganngaaacaaaggnaananccctccccannccttcccnntcngcaaaggnaaaanagggggnaaggtgcaaggtncnnataaggtggtgncaaaancaaacccccccngggggtgtntgnctggcaccgtttgnaataaatttnnattttttaaaaaaannaaaaatttttnntttnttaanananccntnnccaaatntgcctngnctgaaaaccccaagaaaaattngtttttgggntggggccccggcntggncngaaanattgaaaaacccaantcaaatttaatttnaaaaaattnggcacaangcccccaaaaatntttttattntgaaaaaagnnttttnnnntttnntntcnannntttntntttaaaaattn

SEQ ID NO: 924 - DNA, 1305 bp, Homo Sapiens
  misc_feature (769)..(774): n is a, c, g, or t
  misc_feature (776)..(776): n is a, c, g, or t
  misc_feature (778)..(788): n is a, c, g, or t
  misc_feature (790)..(897): n is a, c, g, or t
  misc_feature (903)..(914): n is a, c, g, or t
  misc_feature (918)..(940): n is a, c, g, or t
  misc_feature (943)..(943): n is a, c, g, or t
  misc_feature (952)..(956): n is a, c, g, or t
  misc_feature (959)..(972): n is a, c, g, or t
  misc_feature (974)..(976): n is a, c, g, or t
  misc_feature (978)..(978): n is a, c, g, or t
  misc_feature (982)..(986): n is a, c, g, or t
  misc_feature (993)..(1005): n is a, c, g, or t
  misc_feature (1007)..(1010): n is a, c, g, or t
  misc_feature (1013)..(1017): n is a, c, g, or t
  misc_feature (1028)..(1059): n is a, c, g, or t
  misc_feature (1063)..(1078): n is a, c, g, or t
  misc_feature (1080)..(1089): n is a, c, g, or t
  misc_feature (1092)..(1092): n is a, c, g, or t
  misc_feature (1094)..(1094): n is a, c, g, or t
  misc_feature (1096)..(1107): n is a, c, g, or t
  misc_feature (1109)..(1109): n is a, c, g, or t
  misc_feature (1112)..(1115): n is a, c, g, or t
  misc_feature (1117)..(1122): n is a, c, g, or t
  misc_feature (1128)..(1138): n is a, c, g, or t
  misc_feature (1140)..(1144): n is a, c, g, or t
  misc_feature (1150)..(1155): n is a, c, g, or t
  misc_feature (1159)..(1164): n is a, c, g, or t
  misc_feature (1166)..(1166): n is a, c, g, or t
  misc_feature (1168)..(1202): n is a, c, g, or t
  misc_feature (1204)..(1206): n is a, c, g, or t
  misc_feature (1209)..(1209): n is a, c, g, or t
  misc_feature (1217)..(1220): n is a, c, g, or t
  misc_feature (1224)..(1229): n is a, c, g, or t
  misc_feature (1231)..(1241): n is a, c, g, or t
  misc_feature (1243)..(1243): n is a, c, g, or t
  misc_feature (1245)..(1249): n is a, c, g, or t
  misc_feature (1251)..(1252): n is a, c, g, or t
  misc_feature (1263)..(1265): n is a, c, g, or t
  misc_feature (1269)..(1276): n is a, c, g, or t
  misc_feature (1278)..(1278): n is a, c, g, or t
  misc_feature (1280)..(1280): n is a, c, g, or t
  misc_feature (1282)..(1286): n is a, c, g, or t
  misc_feature (1291)..(1305): n is a, c, g, or t
agaaattactatgagaggatcgcatcaccatcaccatcacggatcctatttaggtgacactatagaatcgtcgacccacgcgtccggaaatgggagcacagtactgggaaatgggagcatagtgctgggaaatgggagcacagtactgagaaatgggagcacagtactgggaaatggtagcacagtactaggaaatgggatcacagtgctgggaaatgggagcacagtaatgggaaatgggagcacagtgctgggaaatgggagctcacagtactgggaaatgggagcacagtattcggaaatgggagcacagtactgggaaatgggagctcacagcactgggaaatggagcatagcattgggaaatgggagcacagtactgggaaatggaagctcacagtcctgggaaatgggagcatagtgctgggaaatgggagcacagtactgagaaatgggagcacagtactgggaaatgggagcccagtactgagaaatgggagcacacagtactgtgaaatgggagcacacagtactgtgaaatgggagcacagtactgggaaatgggagcatagtactgagaaaccccagacctggattctgagtttttcagtctagcccagacttcttatcttagtagacaaaaagagtcaataccagagaaccagaggcatcctctgtattttaatgaactctgtgttttagtctgtttagtagtcatattttaaaaagataatcagttttctaaatatatctataagttactacctgnnnnnnanannnnnnnnnnnannnnnnnnnnnnnnnnnnnnnnnnnnnnnnnnnnnnnnnnnnnnnnnnnnnnnnnnnnnnnnnnnnnnnnnnnnnnnnnnnnnnnnnnnnnnnnnnnnnnnnnnnnnncccccnnnnnnnnnnnncccnnnnnnnnnnnnnnnnnnnnnnnccnccccttttnnnnnccnnnnnnnnnnnnnnannncncccnnnnnttttttnnnnnnnnnnnnntnnnnccnnnnnttttttttttnnnnnnnnnnnnnnnnnnnnnnnnnnnnnnnntttnnnnnnnnnnnnnnnntnnnnnnnnnnaananannnnnnnnnnnncnccnnnntnnnnnncccccnnnnnnnnnnnannnnntttttnnnnnntttnnnnnntntnnnnnnnnnnnnnnnnnnnnnnnnnnnnnnnnnnntnnnccntttttttnnnncccnnnnnnannnnnnnnnnntntnnnnncnnttttttttttnnncccnnnnnnnncncncnnnnnttttnnnnnnnnnnnnnnn

SEQ ID NO: 925 - DNA, 1387 bp, Homo Sapiens
  misc_feature (1)..(1): n is a, c, g, or t
  misc_feature (835)..(835): n is a, c, g, or t
  misc_feature (875)..(875): n is a, c, g, or t
  misc_feature (906)..(906): n is a, c, g, or t
  misc_feature (923)..(923): n is a, c, g, or t
  misc_feature (925)..(925): n is a, c, g, or t
  misc_feature (945)..(945): n is a, c, g, or t
  misc_feature (954)..(954): n is a, c, g, or t
  misc_feature (956)..(956): n is a, c, g, or t
  misc_feature (961)..(961): n is a, c, g, or t
  misc_feature (985)..(985): n is a, c, g, or t
  misc_feature (1004)..(1004): n is a, c, g, or t
  misc_feature (1007)..(1007): n is a, c, g, or t
  misc_feature (1014)..(1014): n is a, c, g, or t
  misc_feature (1019)..(1020): n is a, c, g, or t
  misc_feature (1026)..(1026): n is a, c, g, or t
  misc_feature (1030)..(1030): n is a, c, g, or t
  misc_feature (1033)..(1033): n is a, c, g, or t
  misc_feature (1038)..(1038): n is a, c, g, or t
  misc_feature (1051)..(1051): n is a, c, g, or t
  misc_feature (1083)..(1083): n is a, c, g, or t
  misc_feature (1097)..(1097): n is a, c, g, or t
  misc_feature (1099)..(1099): n is a, c, g, or t
  misc_feature (1101)..(1101): n is a, c, g, or t
  misc_feature (1105)..(1105): n is a, c, g, or t
  misc_feature (1122)..(1122): n is a, c, g, or t
  misc_feature (1137)..(1137): n is a, c, g, or t
  misc_feature (1140)..(1140): n is a, c, g, or t
  misc_feature (1153)..(1153): n is a, c, g, or t
  misc_feature (1157)..(1157): n is a, c, g, or t
  misc_feature (1162)..(1162): n is a, c, g, or t
  misc_feature (1164)..(1164): n is a, c, g, or t
  misc_feature (1167)..(1167): n is a, c, g, or t
  misc_feature (1173)..(1173): n is a, c, g, or t
  misc_feature (1184)..(1184): n is a, c, g, or t
  misc_feature (1193)..(1196): n is a, c, g, or t
  misc_feature (1205)..(1205): n is a, c, g, or t
  misc_feature (1209)..(1209): n is a, c, g, or t
  misc_feature (1221)..(1221): n is a, c, g, or t
  misc_feature (1225)..(1225): n is a, c, g, or t
  misc_feature (1230)..(1230): n is a, c, g, or t
  misc_feature (1239)..(1241): n is a, c, g, or t
  misc_feature (1247)..(1247): n is a, c, g, or t
  misc_feature (1258)..(1258): n is a, c, g, or t
  misc_feature (1270)..(1271): n is a, c, g, or t
  misc_feature (1273)..(1273): n is a, c, g, or t
  misc_feature (1275)..(1275): n is a, c, g, or t
  misc_feature (1281)..(1281): n is a, c, g, or t
  misc_feature (1285)..(1285): n is a, c, g, or t
  misc_feature (1294)..(1294): n is a, c, g, or t
  misc_feature (1303)..(1305): n is a, c, g, or t
  misc_feature (1321)..(1321): n is a, c, g, or t
  misc_feature (1327)..(1327): n is a, c, g, or t
  misc_feature (1330)..(1330): n is a, c, g, or t
  misc_feature (1333)..(1333): n is a, c, g, or t
  misc_feature (1335)..(1335): n is a, c, g, or t
  misc_feature (1339)..(1340): n is a, c, g, or t
  misc_feature (1343)..(1343): n is a, c, g, or t
  misc_feature (1354)..(1355): n is a, c, g, or t
  misc_feature (1359)..(1359): n is a, c, g, or t
  misc_feature (1363)..(1363): n is a, c, g, or t
  misc_feature (1368)..(1368): n is a, c, g, or t
  misc_feature (1373)..(1375): n is a, c, g, or t
  misc_feature (1378)..(1378): n is a, c, g, or t
  misc_feature (1380)..(1380): n is a, c, g, or t
  misc_feature (1387)..(1387): n is a, c, g, or t
naaatagagaaattactatgagaggatcgcatcaccatcaccatcacggatcctatttaggtgacactatagaatcgtcgacccacgcgtccgcccacgcgtccgcccacgcgtccgtttgtttctgtcaggctgtccctggccggggttctgtaacgcttgtgtgggccgcaggtggaggtgttgggaaagcgcggaggagatgttgtccccagtgtcccgagacgcgtctgatgctctgcagggacggaagtgcctgcgtccccgatcgagacgcctgccgctcccggcagctgtccgcgcccacggtcctatggcggagctaacggactccgcgcggggctgtgtggtctttgaggatgtgtttgtatacttctctcgggaagaatgggagcttcttgatgatgctcagagacttttgtaccatgatgtgatgctggagaactttgcacttttagcctcactgggaattgcattttccagatcacgtgcagtcatgaaactagagcgaggagaagagccctgggtgtatgaccaggtggatatgacttcagccacagaaagagaggcccagaggggacttagacctggttgttggcatggagtggaggatgaagaggtatcttctgagcagagcatttttgtagcaggagtgtcagaggtcaggactctcatggcagagctggagtctcacccatgtgacatatgtggcccaatattgaaagataccttacacctggctaaataccatgggggaaaagccaggcagaaaccatacttgtgtggggcatgtggaaagcaattctggttcagtacagactttgaccagcaccanaaccagcccaatggagggaaacttttcccaaggaaagganggcaaaaaactctgtgaaaaacttgcaaaantccatgtgccaaaaaananccctcacatgtgggaaaagnaaagaaaananttttncagccacatctgggccttcttcancatcaaggcctctctcaanaancatgaanccccnnaaaaancacnaanccttnggaatggctttcncatgggaaaaaaagtatccaaaggtgtggggnaatggggaaaaccntncncccncaaaaaaacactttgcnccggaatcaaaaaanccnacctggaaaaagncctnaaaantnaanaaaagngggaaattctncacccaaannnnaaccttttnaaanccaaaaattccnctgnaaaangccaacaannnccaaangggaaaatttnaaaaaccccgcnnantnaccccngaantccccgggnaaaactttnnngggaaggggaaatttnaaaaantanccntncccnnaancccaaaccccnntttntccnaaggnaaaannnccnanacctttn

SEQ ID NO: 926 - DNA, 1355 bp, Homo Sapiens
  misc_feature (1)..(1): n is a, c, g, or t
  misc_feature (887)..(887): n is a, c, g, or t
  misc_feature (915)..(915): n is a, c, g, or t
  misc_feature (918)..(918): n is a, c, g, or t
  misc_feature (958)..(958): n is a, c, g, or t
  misc_feature (965)..(965): n is a, c, g, or t
  misc_feature (975)..(975): n is a, c, g, or t
  misc_feature (986)..(986): n is a, c, g, or t
  misc_feature (988)..(988): n is a, c, g, or t
  misc_feature (990)..(990): n is a, c, g, or t
  misc_feature (1013)..(1013): n is a, c, g, or t
  misc_feature (1020)..(1020): n is a, c, g, or t
  misc_feature (1049)..(1049): n is a, c, g, or t
  misc_feature (1052)..(1054): n is a, c, g, or t
  misc_feature (1056)..(1056): n is a, c, g, or t
  misc_feature (1059)..(1059): n is a, c, g, or t
  misc_feature (1063)..(1063): n is a, c, g, or t
  misc_feature (1066)..(1066): n is a, c, g, or t
  misc_feature (1071)..(1072): n is a, c, g, or t
  misc_feature (1083)..(1083): n is a, c, g, or t
  misc_feature (1095)..(1095): n is a, c, g, or t
  misc_feature (1098)..(1098): n is a, c, g, or t
  misc_feature (1100)..(1100): n is a, c, g, or t
  misc_feature (1102)..(1102): n is a, c, g, or t
  misc_feature (1107)..(1107): n is a, c, g, or t
  misc_feature (1114)..(1114): n is a, c, g, or t
  misc_feature (1116)..(1116): n is a, c, g, or t
  misc_feature (1122)..(1122): n is a, c, g, or t
  misc_feature (1125)..(1125): n is a, c, g, or t
  misc_feature (1128)..(1128): n is a, c, g, or t
  misc_feature (1133)..(1133): n is a, c, g, or t
  misc_feature (1142)..(1142): n is a, c, g, or t
  misc_feature (1155)..(1156): n is a, c, g, or t
  misc_feature (1160)..(1160): n is a, c, g, or t
  misc_feature (1163)..(1163): n is a, c, g, or t
  misc_feature (1167)..(1167): n is a, c, g, or t
  misc_feature (1170)..(1171): n is a, c, g, or t
  misc_feature (1180)..(1182): n is a, c, g, or t
  misc_feature (1187)..(1187): n is a, c, g, or t
  misc_feature (1189)..(1189): n is a, c, g, or t
  misc_feature (1194)..(1195): n is a, c, g, or t
  misc_feature (1198)..(1198): n is a, c, g, or t
  misc_feature (1200)..(1200): n is a, c, g, or t
  misc_feature (1202)..(1202): n is a, c, g, or t
  misc_feature (1214)..(1214): n is a, c, g, or t
  misc_feature (1218)..(1218): n is a, c, g, or t
  misc_feature (1227)..(1228): n is a, c, g, or t
  misc_feature (1238)..(1240): n is a, c, g, or t
  misc_feature (1246)..(1246): n is a, c, g, or t
  misc_feature (1250)..(1250): n is a, c, g, or t
  misc_feature (1255)..(1257): n is a, c, g, or t
  misc_feature (1263)..(1263): n is a, c, g, or t
  misc_feature (1267)..(1267): n is a, c, g, or t
  misc_feature (1275)..(1275): n is a, c, g, or t
  misc_feature (1283)..(1283): n is a, c, g, or t
  misc_feature (1287)..(1287): n is a, c, g, or t
  misc_feature (1289)..(1290): n is a, c, g, or t
  misc_feature (1298)..(1298): n is a, c, g, or t
  misc_feature (1301)..(1301): n is a, c, g, or t
  misc_feature (1304)..(1304): n is a, c, g, or t
  misc_feature (1308)..(1308): n is a, c, g, or t
  misc_feature (1311)..(1311): n is a, c, g, or t
  misc_feature (1314)..(1315): n is a, c, g, or t
  misc_feature (1317)..(1318): n is a, c, g, or t
  misc_feature (1321)..(1321): n is a, c, g, or t
  misc_feature (1325)..(1329): n is a, c, g, or t
  misc_feature (1331)..(1331): n is a, c, g, or t
  misc_feature (1333)..(1335): n is a, c, g, or t
  misc_feature (1337)..(1337): n is a, c, g, or t
  misc_feature (1339)..(1339): n is a, c, g, or t
  misc_feature (1342)..(1342): n is a, c, g, or t
  misc_feature (1346)..(1346): n is a, c, g, or t
  misc_feature (1349)..(1350): n is a, c, g, or t
  misc_feature (1352)..(1353): n is a, c, g, or t
naatagagaaattactatgagaggatcgcatcaccatcaccatcacgggatcctatttaggtgacactatagaatcgtcgacccacgcgtccggcacaatgggccatggagttcccgttcgatgtggacgcgctgttcccggagcggatcacggtgctggaccagcacctgaggcccccagcccgccgacccggaaccacaacgccggcccgtgttgatctacagcagcaaattatgaccattatagatgaactgggcaaggcttctgccaaggcccagaatctttccgctcctatcactagtgcatcaaggatgcagagtaaccgccatgttgtttatattctcaaagacagttcagcccgaccggctggaaaaggagccattattggtttcatcaaagttggatacaagaagctctttgtactggatgatcgtgaggctcataatgaggtagaaccactttgcatcctggacttttacatccatgagtctgtgcaacgccatggccatgggcgagaactcttccagtatatgttgcagaaggagcgagtggaaccgcaccaactggcaattgaccgaccctcacagaagctgctgaaattcctgaataagcactacaatctggagaccacagtcccacaggtgaacaactttgtgatctttgaaggcttctttgcccatcaacatcggccccctgctccctctctgagggcaactcgacactctcgtgctgctgcagtcgatcccacgcccgctgctccagcaaggaagctgccacccaagagagcagagggagacatcaagccatactcctctagtgaccgagaatttctgaaggtagctgtggagcctccttggcccctaaacagggcccctcgccgcgccanacctccagcccacccacccccccgctcnagnagcctgggaaactcaccaaaacgaggtcccctccgccccnttgtgcnaaaacagganctgctgcgttncntngggcctctgcccccaaaacctancgcccgncttttgttggctgctgaaccctggggcanccnnntnaangtcntcnaacanntccctttcccngctctgaggaantcnananaaaanctacccntnccctgnccnggnaaacnggggggggnaggaacccccccnnaaanccnaaanccnntctcctttnnncctgnanaaccnnggnancngaaaaacccaangatnccccttttnntttttaaaannnggaagngggnccaannnccaaantttnaatttttnaaaaaaancccntnncccaaatnggnccnaaanttnccnnannaantaannnnncnannntngnaanggcnaanntnnaa

SEQ ID NO: 927 - DNA, 2069 bp, Homo Sapiens
  misc_feature (2)..(2): n is a, c, g, or t
  misc_feature (7)..(7): n is a, c, g, or t
  misc_feature (16)..(16): n is a, c, g, or t
  misc_feature (18)..(18): n is a, c, g, or t
  misc_feature (25)..(25): n is a, c, g, or t
  misc_feature (37)..(40): n is a, c, g, or t
  misc_feature (45)..(46): n is a, c, g, or t
  misc_feature (52)..(53): n is a, c, g, or t
  misc_feature (55)..(55): n is a, c, g, or t
  misc_feature (58)..(58): n is a, c, g, or t
  misc_feature (61)..(61): n is a, c, g, or t
  misc_feature (64)..(64): n is a, c, g, or t
  misc_feature (69)..(69): n is a, c, g, or t
  misc_feature (73)..(73): n is a, c, g, or t
  misc_feature (78)..(78): n is a, c, g, or t
  misc_feature (81)..(81): n is a, c, g, or t
  misc_feature (85)..(85): n is a, c, g, or t
  misc_feature (87)..(87): n is a, c, g, or t
  misc_feature (90)..(91): n is a, c, g, or t
  misc_feature (97)..(98): n is a, c, g, or t
  misc_feature (102)..(103): n is a, c, g, or t
  misc_feature (105)..(105): n is a, c, g, or t
  misc_feature (125)..(125): n is a, c, g, or t
  misc_feature (127)..(127): n is a, c, g, or t
  misc_feature (133)..(133): n is a, c, g, or t
  misc_feature (138)..(141): n is a, c, g, or t
  misc_feature (144)..(145): n is a, c, g, or t
  misc_feature (147)..(147): n is a, c, g, or t
  misc_feature (152)..(152): n is a, c, g, or t
  misc_feature (154)..(155): n is a, c, g, or t
  misc_feature (157)..(159): n is a, c, g, or t
  misc_feature (161)..(161): n is a, c, g, or t
  misc_feature (171)..(172): n is a, c, g, or t
  misc_feature (175)..(175): n is a, c, g, or t
  misc_feature (187)..(189): n is a, c, g, or t
  misc_feature (195)..(196): n is a, c, g, or t
  misc_feature (211)..(211): n is a, c, g, or t
  misc_feature (217)..(217): n is a, c, g, or t
  misc_feature (227)..(227): n is a, c, g, or t
  misc_feature (229)..(230): n is a, c, g, or t
  misc_feature (235)..(235): n is a, c, g, or t
  misc_feature (238)..(238): n is a, c, g, or t
  misc_feature (244)..(245): n is a, c, g, or t
  misc_feature (250)..(250): n is a, c, g, or t
  misc_feature (256)..(260): n is a, c, g, or t
  misc_feature (269)..(269): n is a, c, g, or t
  misc_feature (271)..(273): n is a, c, g, or t
  misc_feature (276)..(277): n is a, c, g, or t
  misc_feature (282)..(282): n is a, c, g, or t
  misc_feature (286)..(286): n is a, c, g, or t
  misc_feature (288)..(288): n is a, c, g, or t
  misc_feature (290)..(290): n is a, c, g, or t
  misc_feature (297)..(297): n is a, c, g, or t
  misc_feature (302)..(302): n is a, c, g, or t
  misc_feature (307)..(307): n is a, c, g, or t
  misc_feature (316)..(317): n is a, c, g, or t
  misc_feature (319)..(319): n is a, c, g, or t
  misc_feature (327)..(327): n is a, c, g, or t
  misc_feature (332)..(332): n is a, c, g, or t
  misc_feature (334)..(334): n is a, c, g, or t
  misc_feature (338)..(338): n is a, c, g, or t
  misc_feature (341)..(343): n is a, c, g, or t
  misc_feature (348)..(349): n is a, c, g, or t
  misc_feature (351)..(351): n is a, c, g, or t
  misc_feature (353)..(353): n is a, c, g, or t
  misc_feature (355)..(356): n is a, c, g, or t
  misc_feature (359)..(361): n is a, c, g, or t
  misc_feature (363)..(363): n is a, c, g, or t
  misc_feature (365)..(365): n is a, c, g, or t
  misc_feature (371)..(371): n is a, c, g, or t
  misc_feature (373)..(373): n is a, c, g, or t
  misc_feature (375)..(375): n is a, c, g, or t
  misc_feature (377)..(377): n is a, c, g, or t
  misc_feature (381)..(381): n is a, c, g, or t
  misc_feature (388)..(389): n is a, c, g, or t
  misc_feature (391)..(392): n is a, c, g, or t
  misc_feature (395)..(395): n is a, c, g, or t
  misc_feature (397)..(397): n is a, c, g, or t
  misc_feature (400)..(400): n is a, c, g, or t
  misc_feature (409)..(409): n is a, c, g, or t
  misc_feature (412)..(412): n is a, c, g, or t
  misc_feature (417)..(419): n is a, c, g, or t
  misc_feature (425)..(426): n is a, c, g, or t
  misc_feature (428)..(428): n is a, c, g, or t
  misc_feature (430)..(431): n is a, c, g, or t
  misc_feature (433)..(434): n is a, c, g, or t
  misc_feature (436)..(436): n is a, c, g, or t
  misc_feature (439)..(439): n is a, c, g, or t
  misc_feature (442)..(442): n is a, c, g, or t
  misc_feature (444)..(444): n is a, c, g, or t
  misc_feature (446)..(446): n is a, c, g, or t
  misc_feature (449)..(449): n is a, c, g, or t
  misc_feature (453)..(453): n is a, c, g, or t
  misc_feature (455)..(455): n is a, c, g, or t
  misc_feature (462)..(462): n is a, c, g, or t
  misc_feature (464)..(465): n is a, c, g, or t
  misc_feature (467)..(467): n is a, c, g, or t
  misc_feature (469)..(470): n is a, c, g, or t
  misc_feature (476)..(477): n is a, c, g, or t
  misc_feature (480)..(480): n is a, c, g, or t
  misc_feature (486)..(486): n is a, c, g, or t
  misc_feature (488)..(488): n is a, c, g, or t
  misc_feature (493)..(494): n is a, c, g, or t
  misc_feature (500)..(500): n is a, c, g, or t
  misc_feature (502)..(503): n is a, c, g, or t
  misc_feature (505)..(505): n is a, c, g, or t
  misc_feature (507)..(507): n is a, c, g, or t
  misc_feature (511)..(511): n is a, c, g, or t
  misc_feature (513)..(513): n is a, c, g, or t
  misc_feature (519)..(520): n is a, c, g, or t
  misc_feature (522)..(522): n is a, c, g, or t
  misc_feature (527)..(527): n is a, c, g, or t
  misc_feature (533)..(534): n is a, c, g, or t
  misc_feature (536)..(536): n is a, c, g, or t
  misc_feature (539)..(540): n is a, c, g, or t
  misc_feature (542)..(546): n is a, c, g, or t
  misc_feature (549)..(549): n is a, c, g, or t
  misc_feature (552)..(556): n is a, c, g, or t
  misc_feature (559)..(559): n is a, c, g, or t
  misc_feature (562)..(562): n is a, c, g, or t
  misc_feature (564)..(564): n is a, c, g, or t
  misc_feature (566)..(566): n is a, c, g, or t
  misc_feature (568)..(570): n is a, c, g, or t
  misc_feature (572)..(574): n is a, c, g, or t
  misc_feature (576)..(576): n is a, c, g, or t
  misc_feature (582)..(583): n is a, c, g, or t
  misc_feature (585)..(586): n is a, c, g, or t
  misc_feature (589)..(589): n is a, c, g, or t
  misc_feature (592)..(593): n is a, c, g, or t
  misc_feature (595)..(595): n is a, c, g, or t
  misc_feature (597)..(598): n is a, c, g, or t
  misc_feature (604)..(604): n is a, c, g, or t
  misc_feature (607)..(607): n is a, c, g, or t
  misc_feature (614)..(615): n is a, c, g, or t
  misc_feature (618)..(618): n is a, c, g, or t
  misc_feature (620)..(620): n is a, c, g, or t
  misc_feature (622)..(622): n is a, c, g, or t
  misc_feature (624)..(624): n is a, c, g, or t
  misc_feature (627)..(628): n is a, c, g, or t
  misc_feature (630)..(630): n is a, c, g, or t
  misc_feature (632)..(636): n is a, c, g, or t
  misc_feature (638)..(639): n is a, c, g, or t
  misc_feature (641)..(641): n is a, c, g, or t
  misc_feature (645)..(646): n is a, c, g, or t
  misc_feature (650)..(652): n is a, c, g, or t
  misc_feature (654)..(655): n is a, c, g, or t
  misc_feature (657)..(659): n is a, c, g, or t
  misc_feature (661)..(664): n is a, c, g, or t
  misc_feature (666)..(668): n is a, c, g, or t
  misc_feature (670)..(670): n is a, c, g, or t
  misc_feature (674)..(674): n is a, c, g, or t
  misc_feature (677)..(680): n is a, c, g, or t
  misc_feature (684)..(685): n is a, c, g, or t
  misc_feature (690)..(694): n is a, c, g, or t
  misc_feature (696)..(696): n is a, c, g, or t
  misc_feature (698)..(698): n is a, c, g, or t
  misc_feature (702)..(703): n is a, c, g, or t
  misc_feature (705)..(705): n is a, c, g, or t
  misc_feature (708)..(710): n is a, c, g, or t
  misc_feature (713)..(714): n is a, c, g, or t
  misc_feature (717)..(717): n is a, c, g, or t
  misc_feature (719)..(720): n is a, c, g, or t
  misc_feature (723)..(725): n is a, c, g, or t
  misc_feature (727)..(728): n is a, c, g, or t
  misc_feature (733)..(733): n is a, c, g, or t
  misc_feature (736)..(736): n is a, c, g, or t
  misc_feature (738)..(738): n is a, c, g, or t
  misc_feature (741)..(743): n is a, c, g, or t
  misc_feature (745)..(745): n is a, c, g, or t
  misc_feature (747)..(747): n is a, c, g, or t
  misc_feature (749)..(750): n is a, c, g, or t
  misc_feature (754)..(758): n is a, c, g, or t
  misc_feature (760)..(760): n is a, c, g, or t
  misc_feature (763)..(767): n is a, c, g, or t
  misc_feature (770)..(771): n is a, c, g, or t
  misc_feature (773)..(773): n is a, c, g, or t
  misc_feature (777)..(777): n is a, c, g, or t
  misc_feature (783)..(783): n is a, c, g, or t
  misc_feature (785)..(787): n is a, c, g, or t
  misc_feature (791)..(793): n is a, c, g, or t
  misc_feature (798)..(799): n is a, c, g, or t
  misc_feature (801)..(801): n is a, c, g, or t
  misc_feature (803)..(805): n is a, c, g, or t
  misc_feature (810)..(810): n is a, c, g, or t
  misc_feature (812)..(812): n is a, c, g, or t
  misc_feature (814)..(816): n is a, c, g, or t
  misc_feature (822)..(825): n is a, c, g, or t
  misc_feature (832)..(833): n is a, c, g, or t
  misc_feature (837)..(837): n is a, c, g, or t
  misc_feature (839)..(839): n is a, c, g, or t
  misc_feature (843)..(843): n is a, c, g, or t
  misc_feature (845)..(846): n is a, c, g, or t
  misc_feature (848)..(850): n is a, c, g, or t
  misc_feature (854)..(854): n is a, c, g, or t
  misc_feature (856)..(856): n is a, c, g, or t
  misc_feature (859)..(859): n is a, c, g, or t
  misc_feature (861)..(861): n is a, c, g, or t
  misc_feature (865)..(867): n is a, c, g, or t
  misc_feature (869)..(869): n is a, c, g, or t
  misc_feature (871)..(871): n is a, c, g, or t
  misc_feature (874)..(875): n is a, c, g, or t
  misc_feature (878)..(878): n is a, c, g, or t
  misc_feature (880)..(882): n is a, c, g, or t
  misc_feature (885)..(886): n is a, c, g, or t
  misc_feature (888)..(888): n is a, c, g, or t
  misc_feature (890)..(891): n is a, c, g, or t
  misc_feature (902)..(903): n is a, c, g, or t
  misc_feature (905)..(909): n is a, c, g, or t
  misc_feature (913)..(914): n is a, c, g, or t
  misc_feature (916)..(917): n is a, c, g, or t
  misc_feature (919)..(919): n is a, c, g, or t
  misc_feature (921)..(924): n is a, c, g, or t
  misc_feature (928)..(928): n is a, c, g, or t
  misc_feature (930)..(931): n is a, c, g, or t
  misc_feature (941)..(941): n is a, c, g, or t
  misc_feature (946)..(947): n is a, c, g, or t
  misc_feature (951)..(953): n is a, c, g, or t
  misc_feature (955)..(955): n is a, c, g, or t
  misc_feature (957)..(961): n is a, c, g, or t
  misc_feature (963)..(963): n is a, c, g, or t
  misc_feature (965)..(965): n is a, c, g, or t
  misc_feature (967)..(968): n is a, c, g, or t
  misc_feature (972)..(974): n is a, c, g, or t
  misc_feature (976)..(976): n is a, c, g, or t
  misc_feature (981)..(984): n is a, c, g, or t
  misc_feature (988)..(991): n is a, c, g, or t
  misc_feature (993)..(993): n is a, c, g, or t
  misc_feature (998)..(998): n is a, c, g, or t
  misc_feature (1001)..(1001): n is a, c, g, or t
  misc_feature (1003)..(1003): n is a, c, g, or t
  misc_feature (1012)..(1012): n is a, c, g, or t
  misc_feature (1015)..(1015): n is a, c, g, or t
  misc_feature (1018)..(1019): n is a, c, g, or t
  misc_feature (1023)..(1024): n is a, c, g, or t
  misc_feature (1027)..(1027): n is a, c, g, or t
  misc_feature (1029)..(1029): n is a, c, g, or t
  misc_feature (1031)..(1032): n is a, c, g, or t
  misc_feature (1035)..(1035): n is a, c, g, or t
  misc_feature (1038)..(1038): n is a, c, g, or t
  misc_feature (1041)..(1041): n is a, c, g, or t
  misc_feature (1043)..(1043): n is a, c, g, or t
  misc_feature (1052)..(1052): n is a, c, g, or t
  misc_feature (1055)..(1057): n is a, c, g, or t
  misc_feature (1059)..(1060): n is a, c, g, or t
  misc_feature (1062)..(1064): n is a, c, g, or t
  misc_feature (1066)..(1067): n is a, c, g, or t
  misc_feature (1070)..(1070): n is a, c, g, or t
  misc_feature (1072)..(1073): n is a, c, g, or t
  misc_feature (1076)..(1076): n is a, c, g, or t
  misc_feature (1079)..(1079): n is a, c, g, or t
  misc_feature (1083)..(1083): n is a, c, g, or t
  misc_feature (1086)..(1090): n is a, c, g, or t
  misc_feature (1099)..(1100): n is a, c, g, or t
  misc_feature (1105)..(1105): n is a, c, g, or t
  misc_feature (1107)..(1107): n is a, c, g, or t
  misc_feature (1114)..(1114): n is a, c, g, or t
  misc_feature (1116)..(1116): n is a, c, g, or t
  misc_feature (1124)..(1124): n is a, c, g, or t
  misc_feature (1131)..(1131): n is a, c, g, or t
  misc_feature (1135)..(1136): n is a, c, g, or t
  misc_feature (1140)..(1140): n is a, c, g, or t
  misc_feature (1142)..(1142): n is a, c, g, or t
  misc_feature (1149)..(1149): n is a, c, g, or t
  misc_feature (1157)..(1158): n is a, c, g, or t
  misc_feature (1161)..(1161): n is a, c, g, or t
  misc_feature (1163)..(1164): n is a, c, g, or t
  misc_feature (1167)..(1167): n is a, c, g, or t
  misc_feature (1169)..(1171): n is a, c, g, or t
  misc_feature (1178)..(1181): n is a, c, g, or t
  misc_feature (1183)..(1183): n is a, c, g, or t
  misc_feature (1187)..(1188): n is a, c, g, or t
  misc_feature (1192)..(1192): n is a, c, g, or t
  misc_feature (1200)..(1204): n is a, c, g, or t
  misc_feature (1207)..(1207): n is a, c, g, or t
  misc_feature (1210)..(1211): n is a, c, g, or t
  misc_feature (1214)..(1214): n is a, c, g, or t
  misc_feature (1217)..(1218): n is a, c, g, or t
  misc_feature (1225)..(1225): n is a, c, g, or t
  misc_feature (1227)..(1227): n is a, c, g, or t
  misc_feature (1231)..(1231): n is a, c, g, or t
  misc_feature (1234)..(1234): n is a, c, g, or t
  misc_feature (1242)..(1243): n is a, c, g, or t
  misc_feature (1245)..(1245): n is a, c, g, or t
  misc_feature (1249)..(1251): n is a, c, g, or t
  misc_feature (1254)..(1255): n is a, c, g, or t
  misc_feature (1261)..(1264): n is a, c, g, or t
  misc_feature (1267)..(1268): n is a, c, g, or t
  misc_feature (1271)..(1271): n is a, c, g, or t
  misc_feature (1273)..(1274): n is a, c, g, or t
  misc_feature (1276)..(1277): n is a, c, g, or t
  misc_feature (1280)..(1280): n is a, c, g, or t
  misc_feature (1289)..(1293): n is a, c, g, or t
  misc_feature (1302)..(1302): n is a, c, g, or t
  misc_feature (1304)..(1304): n is a, c, g, or t
  misc_feature (1306)..(1306): n is a, c, g, or t
  misc_feature (1313)..(1313): n is a, c, g, or t
  misc_feature (1318)..(1318): n is a, c, g, or t
  misc_feature (1322)..(1322): n is a, c, g, or t
  misc_feature (1324)..(1324): n is a, c, g, or t
  misc_feature (1327)..(1327): n is a, c, g, or t
  misc_feature (1329)..(1329): n is a, c, g, or t
  misc_feature (1331)..(1332): n is a, c, g, or t
  misc_feature (1338)..(1339): n is a, c, g, or t
  misc_feature (1342)..(1344): n is a, c, g, or t
  misc_feature (1348)..(1349): n is a, c, g, or t
  misc_feature (1352)..(1353): n is a, c, g, or t
  misc_feature (1356)..(1357): n is a, c, g, or t
  misc_feature (1359)..(1359): n is a, c, g, or t
  misc_feature (1361)..(1361): n is a, c, g, or t
  misc_feature (1363)..(1363): n is a, c, g, or t
  misc_feature (1367)..(1367): n is a, c, g, or t
  misc_feature (1373)..(1373): n is a, c, g, or t
  misc_feature (1376)..(1376): n is a, c, g, or t
  misc_feature (1378)..(1379): n is a, c, g, or t
  misc_feature (1386)..(1386): n is a, c, g, or t
  misc_feature (1388)..(1388): n is a, c, g, or t
  misc_feature (1396)..(1397): n is a, c, g, or t
  misc_feature (1402)..(1402): n is a, c, g, or t
  misc_feature (1404)..(1404): n is a, c, g, or t
  misc_feature (1407)..(1408): n is a, c, g, or t
  misc_feature (1410)..(1410): n is a, c, g, or t
  misc_feature (1413)..(1413): n is a, c, g, or t
  misc_feature (1417)..(1417): n is a, c, g, or t
  misc_feature (1422)..(1422): n is a, c, g, or t
  misc_feature (1424)..(1424): n is a, c, g, or t
  misc_feature (1428)..(1428): n is a, c, g, or t
  misc_feature (1430)..(1430): n is a, c, g, or t
  misc_feature (1432)..(1432): n is a, c, g, or t
  misc_feature (1434)..(1434): n is a, c, g, or t
  misc_feature (1436)..(1439): n is a, c, g, or t
  misc_feature (1441)..(1442): n is a, c, g, or t
  misc_feature (1445)..(1446): n is a, c, g, or t
  misc_feature (1450)..(1450): n is a, c, g, or t
  misc_feature (1457)..(1459): n is a, c, g, or t
  misc_feature (1462)..(1465): n is a, c, g, or t
  misc_feature (1468)..(1469): n is a, c, g, or t
  misc_feature (1474)..(1475): n is a, c, g, or t
  misc_feature (1478)..(1478): n is a, c, g, or t
  misc_feature (1481)..(1481): n is a, c, g, or t
  misc_feature (1485)..(1485): n is a, c, g, or t
  misc_feature (1493)..(1494): n is a, c, g, or t
  misc_feature (1497)..(1498): n is a, c, g, or t
  misc_feature (1501)..(1501): n is a, c, g, or t
  misc_feature (1510)..(1511): n is a, c, g, or t
  misc_feature (1513)..(1513): n is a, c, g, or t
  misc_feature (1515)..(1516): n is a, c, g, or t
  misc_feature (1519)..(1519): n is a, c, g, or t
  misc_feature (1524)..(1524): n is a, c, g, or t
  misc_feature (1528)..(1528): n is a, c, g, or t
  misc_feature (1531)..(1531): n is a, c, g, or t
  misc_feature (1535)..(1535): n is a, c, g, or t
  misc_feature (1541)..(1541): n is a, c, g, or t
  misc_feature (1545)..(1545): n is a, c, g, or t
  misc_feature (1547)..(1549): n is a, c, g, or t
  misc_feature (1553)..(1554): n is a, c, g, or t
  misc_feature (1558)..(1558): n is a, c, g, or t
  misc_feature (1560)..(1560): n is a, c, g, or t
  misc_feature (1562)..(1562): n is a, c, g, or t
  misc_feature (1565)..(1565): n is a, c, g, or t
  misc_feature (1568)..(1568): n is a, c, g, or t
  misc_feature (1571)..(1572): n is a, c, g, or t
  misc_feature (1579)..(1579): n is a, c, g, or t
  misc_feature (1581)..(1581): n is a, c, g, or t
  misc_feature (1584)..(1584): n is a, c, g, or t
  misc_feature (1590)..(1590): n is a, c, g, or t
  misc_feature (1594)..(1594): n is a, c, g, or t
  misc_feature (1597)..(1599): n is a, c, g, or t
  misc_feature (1602)..(1604): n is a, c, g, or t
  misc_feature (1608)..(1609): n is a, c, g, or t
  misc_feature (1612)..(1612): n is a, c, g, or t
  misc_feature (1614)..(1614): n is a, c, g, or t
  misc_feature (1626)..(1626): n is a, c, g, or t
  misc_feature (1634)..(1635): n is a, c, g, or t
  misc_feature (1638)..(1638): n is a, c, g, or t
  misc_feature (1645)..(1645): n is a, c, g, or t
  misc_feature (1648)..(1648): n is a, c, g, or t
  misc_feature (1652)..(1652): n is a, c, g, or t
  misc_feature (1657)..(1657): n is a, c, g, or t
  misc_feature (1661)..(1661): n is a, c, g, or t
  misc_feature (1665)..(1667): n is a, c, g, or t
  misc_feature (1670)..(1670): n is a, c, g, or t
  misc_feature (1674)..(1674): n is a, c, g, or t
  misc_feature (1676)..(1676): n is a, c, g, or t
  misc_feature (1678)..(1678): n is a, c, g, or t
  misc_feature (1683)..(1683): n is a, c, g, or t
  misc_feature (1685)..(1687): n is a, c, g, or t
  misc_feature (1692)..(1692): n is a, c, g, or t
  misc_feature (1699)..(1699): n is a, c, g, or t
  misc_feature (1701)..(1701): n is a, c, g, or t
  misc_feature (1704)..(1707): n is a, c, g, or t
  misc_feature (1711)..(1711): n is a, c, g, or t
  misc_feature (1713)..(1713): n is a, c, g, or t
  misc_feature (1715)..(1715): n is a, c, g, or t
  misc_feature (1719)..(1719): n is a, c, g, or t
  misc_feature (1726)..(1726): n is a, c, g, or t
  misc_feature (1729)..(1729): n is a, c, g, or t
  misc_feature (1733)..(1733): n is a, c, g, or t
  misc_feature (1735)..(1735): n is a, c, g, or t
  misc_feature (1739)..(1740): n is a, c, g, or t
  misc_feature (1744)..(1744): n is a, c, g, or t
  misc_feature (1752)..(1752): n is a, c, g, or t
  misc_feature (1758)..(1758): n is a, c, g, or t
  misc_feature (1766)..(1767): n is a, c, g, or t
  misc_feature (1771)..(1771): n is a, c, g, or t
  misc_feature (1777)..(1780): n is a, c, g, or t
  misc_feature (1786)..(1786): n is a, c, g, or t
  misc_feature (1794)..(1794): n is a, c, g, or t
  misc_feature (1796)..(1796): n is a, c, g, or t
  misc_feature (1798)..(1798): n is a, c, g, or t
  misc_feature (1812)..(1814): n is a, c, g, or t
  misc_feature (1819)..(1819): n is a, c, g, or t
  misc_feature (1821)..(1822): n is a, c, g, or t
  misc_feature (1825)..(1825): n is a, c, g, or t
  misc_feature (1829)..(1830): n is a, c, g, or t
  misc_feature (1833)..(1835): n is a, c, g, or t
  misc_feature (1839)..(1839): n is a, c, g, or t
  misc_feature (1841)..(1843): n is a, c, g, or t
  misc_feature (1847)..(1847): n is a, c, g, or t
  misc_feature (1851)..(1851): n is a, c, g, or t
  misc_feature (1855)..(1855): n is a, c, g, or t
  misc_feature (1859)..(1860): n is a, c, g, or t
  misc_feature (1862)..(1862): n is a, c, g, or t
  misc_feature (1876)..(1876): n is a, c, g, or t
  misc_feature (1880)..(1880): n is a, c, g, or t
  misc_feature (1885)..(1886): n is a, c, g, or t
  misc_feature (1888)..(1888): n is a, c, g, or t
  misc_feature (1891)..(1892): n is a, c, g, or t
  misc_feature (1898)..(1898): n is a, c, g, or t
  misc_feature (1900)..(1901): n is a, c, g, or t
  misc_feature (1904)..(1904): n is a, c, g, or t
  misc_feature (1907)..(1908): n is a, c, g, or t
  misc_feature (1910)..(1910): n is a, c, g, or t
  misc_feature (1912)..(1912): n is a, c, g, or t
  misc_feature (1914)..(1916): n is a, c, g, or t
  misc_feature (1919)..(1920): n is a, c, g, or t
  misc_feature (1925)..(1926): n is a, c, g, or t
  misc_feature (1933)..(1933): n is a, c, g, or t
  misc_feature (1935)..(1935): n is a, c, g, or t
  misc_feature (1938)..(1938): n is a, c, g, or t
  misc_feature (1941)..(1941): n is a, c, g, or t
  misc_feature (1944)..(1944): n is a, c, g, or t
  misc_feature (1948)..(1948): n is a, c, g, or t
  misc_feature (1950)..(1950): n is a, c, g, or t
  misc_feature (1953)..(1954): n is a, c, g, or t
  misc_feature (1957)..(1957): n is a, c, g, or t
  misc_feature (1961)..(1962): n is a, c, g, or t
  misc_feature (1968)..(1968): n is a, c, g, or t
  misc_feature (1971)..(1972): n is a, c, g, or t
  misc_feature (1974)..(1974): n is a, c, g, or t
  misc_feature (1977)..(1977): n is a, c, g, or t
  misc_feature (1985)..(1987): n is a, c, g, or t
  misc_feature (1989)..(1993): n is a, c, g, or t
  misc_feature (2000)..(2000): n is a, c, g, or t
  misc_feature (2003)..(2004): n is a, c, g, or t
  misc_feature (2007)..(2007): n is a, c, g, or t
  misc_feature (2009)..(2010): n is a, c, g, or t
  misc_feature (2013)..(2014): n is a, c, g, or t
  misc_feature (2017)..(2017): n is a, c, g, or t
  misc_feature (2021)..(2021): n is a, c, g, or t
  misc_feature (2023)..(2024): n is a, c, g, or t
  misc_feature (2030)..(2030): n is a, c, g, or t
  misc_feature (2032)..(2032): n is a, c, g, or t
  misc_feature (2038)..(2039): n is a, c, g, or t
  misc_feature (2043)..(2043): n is a, c, g, or t
  misc_feature (2048)..(2049): n is a, c, g, or t
  misc_feature (2052)..(2052): n is a, c, g, or t
  misc_feature (2057)..(2059): n is a, c, g, or t
  misc_feature (2062)..(2063): n is a, c, g, or t
  misc_feature (2065)..(2065): n is a, c, g, or t
  misc_feature (2067)..(2069): n is a, c, g, or t
cngactngggggaatncnatgtggngggggtgggggnnnntccanncacacnncncgnggnggnccatntttngtgtnggncagngnaannaaactnntcgnncncctcccctgttcccgtctcncntcgtgntgaannnntcnngnggggncnntnnncntagagctccnnttnggagaccggttnnnatcgcnngtcttgtcttatcancacatntatatctggntnngtccnaantgaagnntattntgagannnnnagataaacngnnngcnngtcanggtnangncctgccnaacancatanaaaattcanncntcacgacntttgntntttngtnnnaagcnnanangnnatnnnantnccatgnancnanactntcgaggnncnnacntngangtgctctangtntatcnnnatcccnntntnncnnanaanaanangngtncctngngattacnanngnanncgtgcnncgnctccantntgcgnntagctntnncncnaatntncctganncnccccnatcccnncnccnntnnnnnacntgnnnnnagntangnancnnnannntntgaacnntnnggncgnngngnntaagtnccnttcggcnntantnancngcnntntnnnnngnngncacnncggnnngnngnnncnnnntnnngnatanccnnnnaaanntactnnnnngngnagtnnanacnnntannacnannaannnannccccnctncngtnnntncncnnacannnnncnaannnnnggnncngtcnccactncnnntctnnncattnntntnnngaccntncnnnatctcnnnnatgcatnnccantncatnannannncaantngcncntatnnntntnaannaantnnncannanannaagtcaccctnnannnnnctanntnngntnnnnctantnncctcatttanttctnntccnnncnannnnngntncnnctannnantgtcnnnntcannnncnctaantcngntccttgctnganccnntgtnncancncnnatntcnaanancaatggtantcnnntnnannntnncgnanntanaanttanatnnnnnccatccganntcatnantattctncngttgtccnatccacntttnnatananatcgaangtttcatnntcnanntgncnnncacctannnntncgtnnagancgacctgnnnnncanttnngcncannccaggantncatnctntaatctannancttnnngannccgaannnnganntancnnanncanggtgtcgtnnnnngtagattcnantnatacaantttcnatancntancnanntccgtnnacnnncggnngannaanncngntntgcnctcacncanannagacccncntatgaatnntctcnancgnntncancatnttaancncttnantncntnnnntnntcnntgcnccttcannncannnngtnnttatnnttnaanatcncgacagtnnacnntcnaagaaatcnncngnncancatanactnaanaccnttcccntacngnnnaccnncgantncnctntcncgnnctaaccntnccncctgtnttcngannntannnctgnntantntgttttcccaancaatctannccngcttcantcnttcntctcncagnccgnnntcngttnancnattcntnnncatcnttgcccncncannnnttgncnanctantcgtctncancacnancccnntctngcccgctntatctntatgactnnctancctccnnnnctatanatcccggngncntataactttatatnnncatancnnctntcannatnnnaagncnnnaacntctngcantaanncntcagtagcaacacncaanaccgnngngannttaatnannacnccnntntntnnnaanntcgtnnactcttnanccnttnctncctncntcnnatngttnncctccntcnncntgnagtcattnnngnnnnngatcacncannacncnngannttncacncnncttatnangttaannctanacttnntcngatcnnnctnnanannn

SEQ ID NO: 928 - DNA, 1406 bp, Homo Sapiens
  misc_feature (7)..(7): n is a, c, g, or t
  misc_feature (349)..(349): n is a, c, g, or t
  misc_feature (354)..(354): n is a, c, g, or t
  misc_feature (356)..(356): n is a, c, g, or t
  misc_feature (369)..(370): n is a, c, g, or t
  misc_feature (386)..(387): n is a, c, g, or t
  misc_feature (390)..(390): n is a, c, g, or t
  misc_feature (399)..(399): n is a, c, g, or t
  misc_feature (401)..(401): n is a, c, g, or t
  misc_feature (409)..(409): n is a, c, g, or t
  misc_feature (413)..(413): n is a, c, g, or t
  misc_feature (422)..(422): n is a, c, g, or t
  misc_feature (428)..(428): n is a, c, g, or t
  misc_feature (437)..(437): n is a, c, g, or t
  misc_feature (439)..(439): n is a, c, g, or t
  misc_feature (446)..(446): n is a, c, g, or t
  misc_feature (450)..(450): n is a, c, g, or t
  misc_feature (492)..(492): n is a, c, g, or t
  misc_feature (527)..(527): n is a, c, g, or t
  misc_feature (536)..(536): n is a, c, g, or t
  misc_feature (560)..(561): n is a, c, g, or t
  misc_feature (579)..(581): n is a, c, g, or t
  misc_feature (587)..(588): n is a, c, g, or t
  misc_feature (590)..(591): n is a, c, g, or t
  misc_feature (593)..(593): n is a, c, g, or t
  misc_feature (598)..(598): n is a, c, g, or t
  misc_feature (601)..(603): n is a, c, g, or t
  misc_feature (608)..(608): n is a, c, g, or t
  misc_feature (616)..(616): n is a, c, g, or t
  misc_feature (626)..(626): n is a, c, g, or t
  misc_feature (632)..(632): n is a, c, g, or t
  misc_feature (634)..(634): n is a, c, g, or t
  misc_feature (648)..(648): n is a, c, g, or t
  misc_feature (653)..(653): n is a, c, g, or t
  misc_feature (663)..(663): n is a, c, g, or t
  misc_feature (674)..(674): n is a, c, g, or t
  misc_feature (684)..(684): n is a, c, g, or t
  misc_feature (687)..(687): n is a, c, g, or t
  misc_feature (693)..(693): n is a, c, g, or t
  misc_feature (695)..(695): n is a, c, g, or t
  misc_feature (704)..(704): n is a, c, g, or t
  misc_feature (707)..(707): n is a, c, g, or t
  misc_feature (709)..(709): n is a, c, g, or t
  misc_feature (712)..(712): n is a, c, g, or t
  misc_feature (724)..(724): n is a, c, g, or t
  misc_feature (729)..(730): n is a, c, g, or t
  misc_feature (742)..(742): n is a, c, g, or t
  misc_feature (745)..(745): n is a, c, g, or t
  misc_feature (749)..(749): n is a, c, g, or t
  misc_feature (766)..(766): n is a, c, g, or t
  misc_feature (774)..(774): n is a, c, g, or t
  misc_feature (780)..(780): n is a, c, g, or t
  misc_feature (786)..(786): n is a, c, g, or t
  misc_feature (806)..(806): n is a, c, g, or t
  misc_feature (816)..(816): n is a, c, g, or t
  misc_feature (825)..(825): n is a, c, g, or t
  misc_feature (836)..(836): n is a, c, g, or t
  misc_feature (840)..(840): n is a, c, g, or t
  misc_feature (844)..(844): n is a, c, g, or t
  misc_feature (852)..(852): n is a, c, g, or t
  misc_feature (858)..(858): n is a, c, g, or t
  misc_feature (866)..(866): n is a, c, g, or t
  misc_feature (870)..(870): n is a, c, g, or t
  misc_feature (875)..(875): n is a, c, g, or t
  misc_feature (907)..(907): n is a, c, g, or t
  misc_feature (910)..(910): n is a, c, g, or t
  misc_feature (918)..(918): n is a, c, g, or t
  misc_feature (920)..(920): n is a, c, g, or t
  misc_feature (932)..(933): n is a, c, g, or t
  misc_feature (936)..(936): n is a, c, g, or t
  misc_feature (958)..(958): n is a, c, g, or t
  misc_feature (960)..(960): n is a, c, g, or t
  misc_feature (966)..(966): n is a, c, g, or t
  misc_feature (970)..(970): n is a, c, g, or t
  misc_feature (980)..(981): n is a, c, g, or t
  misc_feature (986)..(986): n is a, c, g, or t
  misc_feature (995)..(995): n is a, c, g, or t
  misc_feature (1010)..(1011): n is a, c, g, or t
  misc_feature (1013)..(1014): n is a, c, g, or t
  misc_feature (1023)..(1023): n is a, c, g, or t
  misc_feature (1027)..(1027): n is a, c, g, or t
  misc_feature (1029)..(1029): n is a, c, g, or t
  misc_feature (1033)..(1033): n is a, c, g, or t
  misc_feature (1043)..(1043): n is a, c, g, or t
  misc_feature (1051)..(1051): n is a, c, g, or t
  misc_feature (1053)..(1053): n is a, c, g, or t
  misc_feature (1059)..(1059): n is a, c, g, or t
  misc_feature (1066)..(1066): n is a, c, g, or t
  misc_feature (1068)..(1068): n is a, c, g, or t
  misc_feature (1076)..(1076): n is a, c, g, or t
  misc_feature (1079)..(1079): n is a, c, g, or t
  misc_feature (1083)..(1083): n is a, c, g, or t
  misc_feature (1096)..(1096): n is a, c, g, or t
  misc_feature (1102)..(1104): n is a, c, g, or t
  misc_feature (1112)..(1113): n is a, c, g, or t
  misc_feature (1122)..(1122): n is a, c, g, or t
  misc_feature (1134)..(1134): n is a, c, g, or t
  misc_feature (1137)..(1137): n is a, c, g, or t
  misc_feature (1140)..(1140): n is a, c, g, or t
  misc_feature (1143)..(1143): n is a, c, g, or t
  misc_feature (1152)..(1154): n is a, c, g, or t
  misc_feature (1158)..(1158): n is a, c, g, or t
  misc_feature (1160)..(1163): n is a, c, g, or t
  misc_feature (1165)..(1165): n is a, c, g, or t
  misc_feature (1171)..(1171): n is a, c, g, or t
  misc_feature (1174)..(1174): n is a, c, g, or t
  misc_feature (1178)..(1178): n is a, c, g, or t
  misc_feature (1180)..(1180): n is a, c, g, or t
  misc_feature (1195)..(1195): n is a, c, g, or t
  misc_feature (1203)..(1203): n is a, c, g, or t
  misc_feature (1206)..(1206): n is a, c, g, or t
  misc_feature (1211)..(1211): n is a, c, g, or t
  misc_feature (1230)..(1231): n is a, c, g, or t
  misc_feature (1234)..(1234): n is a, c, g, or t
  misc_feature (1236)..(1236): n is a, c, g, or t
  misc_feature (1242)..(1245): n is a, c, g, or t
  misc_feature (1249)..(1249): n is a, c, g, or t
  misc_feature (1253)..(1253): n is a, c, g, or t
  misc_feature (1256)..(1257): n is a, c, g, or t
  misc_feature (1262)..(1262): n is a, c, g, or t
  misc_feature (1266)..(1268): n is a, c, g, or t
  misc_feature (1272)..(1272): n is a, c, g, or t
  misc_feature (1277)..(1277): n is a, c, g, or t
  misc_feature (1279)..(1279): n is a, c, g, or t
  misc_feature (1287)..(1287): n is a, c, g, or t
  misc_feature (1289)..(1289): n is a, c, g, or t
  misc_feature (1291)..(1292): n is a, c, g, or t
  misc_feature (1301)..(1302): n is a, c, g, or t
  misc_feature (1308)..(1308): n is a, c, g, or t
  misc_feature (1317)..(1319): n is a, c, g, or t
  misc_feature (1325)..(1325): n is a, c, g, or t
  misc_feature (1330)..(1330): n is a, c, g, or t
  misc_feature (1332)..(1335): n is a, c, g, or t
  misc_feature (1339)..(1339): n is a, c, g, or t
  misc_feature (1353)..(1354): n is a, c, g, or t
  misc_feature (1362)..(1362): n is a, c, g, or t
  misc_feature (1370)..(1370): n is a, c, g, or t
  misc_feature (1379)..(1379): n is a, c, g, or t
  misc_feature (1381)..(1382): n is a, c, g, or t
  misc_feature (1384)..(1386): n is a, c, g, or t
  misc_feature (1392)..(1392): n is a, c, g, or t
  misc_feature (1400)..(1400): n is a, c, g, or t
  misc_feature (1406)..(1406): n is a, c, g, or t
tagaganattactatgagaggatcgcatcaccatcaccatcacggatcctatttaggtgacactatagaatcgtcgacccacgcgtccgcccacgcgtccgcccacgcgtccgcccacgcgtccgggcagcctattgtctttctccgcggcgaaggtgaggagctgtctcggctcggcccgcgggggagccccgggagccgcacggtggcatttttcaactccgctggagccagtgcccaggaggagcaaagggtgtgctgccagcccctggctcacccagtggcctcgtcccagaagaagccagaggtagcggccccagccccagagagtgggggtgagtctgtgtgngtgcncnggccacccccggnnggcttgtacccggtgnncgnggtggctgntnctacatgnaganctgtcacgnaaccgnaacagcagngntgaagcncctnggctcggccgagaccgccgtgcccattgctcgcctcggttgncgccgctttagccgcagccgctgatgccgccgccnggggaaagncaacctattgtctttctccgcggnnaaggtgaagatctgtctnnnctcggnncnngnggganccnnnggagncgcacggnggaatttttnaactcngntggagccattgtcnagaangaataaaggntgtgctgccancccctggctnacncaatgncntcgtcccanaanangcnaaaagtagcggncccanncccaaacagtgntgntgantctgtgtttggggaganccaccggnccctgnaggggnacatgtaaaaaactgcaaangactttatgnaaggataangtgaacctganggancggntagagaanctagancttcaatnctcnaactnttcaggaaaggacacaccccatagaaagtacntcngccagggngnagtgtcagaaanncanccactggaaaagaaggaaatcntncaaggntggnccaagaccannaaganaaaaaaagnttttattctaaatcnncnntgggattgntaananaaanaggagggggnaccctgantntccccntaaatgnangggaattnggntttnggaattccagggntgggannntgaaaatnncccttgcancttggttcaaangcnaanaantccaaaaannncctngnnnncnggggtncangggncnaaaacccctgggtangatcaaanaantttgntttgaaaggggaatcaggnnatnanaaatcnnnncccnaaanttnngaatnaaannnaaantaaanancccccggnangnnttaattttnnaaattngttggaaannnaaaaanaaaantnnnntggnccccaaaaaaaaannaatttttntttaaaangggggaaancnncnnntaaaanaaaaaaantggggn

SEQ ID NO: 929 - DNA, 1397 bp, Homo Sapiens
  misc_feature (881)..(881): n is a, c, g, or t
  misc_feature (921)..(921): n is a, c, g, or t
  misc_feature (932)..(932): n is a, c, g, or t
  misc_feature (938)..(938): n is a, c, g, or t
  misc_feature (941)..(941): n is a, c, g, or t
  misc_feature (954)..(954): n is a, c, g, or t
  misc_feature (958)..(958): n is a, c, g, or t
  misc_feature (965)..(965): n is a, c, g, or t
  misc_feature (975)..(975): n is a, c, g, or t
  misc_feature (987)..(987): n is a, c, g, or t
  misc_feature (998)..(998): n is a, c, g, or t
  misc_feature (1007)..(1007): n is a, c, g, or t
  misc_feature (1015)..(1015): n is a, c, g, or t
  misc_feature (1021)..(1021): n is a, c, g, or t
  misc_feature (1025)..(1025): n is a, c, g, or t
  misc_feature (1047)..(1047): n is a, c, g, or t
  misc_feature (1057)..(1057): n is a, c, g, or t
  misc_feature (1063)..(1063): n is a, c, g, or t
  misc_feature (1077)..(1077): n is a, c, g, or t
  misc_feature (1080)..(1080): n is a, c, g, or t
  misc_feature (1083)..(1083): n is a, c, g, or t
  misc_feature (1087)..(1087): n is a, c, g, or t
  misc_feature (1091)..(1091): n is a, c, g, or t
  misc_feature (1094)..(1094): n is a, c, g, or t
  misc_feature (1100)..(1100): n is a, c, g, or t
  misc_feature (1106)..(1107): n is a, c, g, or t
  misc_feature (1112)..(1112): n is a, c, g, or t
  misc_feature (1120)..(1120): n is a, c, g, or t
  misc_feature (1126)..(1126): n is a, c, g, or t
  misc_feature (1134)..(1134): n is a, c, g, or t
  misc_feature (1139)..(1139): n is a, c, g, or t
  misc_feature (1146)..(1146): n is a, c, g, or t
  misc_feature (1149)..(1150): n is a, c, g, or t
  misc_feature (1155)..(1155): n is a, c, g, or t
  misc_feature (1164)..(1164): n is a, c, g, or t
  misc_feature (1174)..(1174): n is a, c, g, or t
  misc_feature (1186)..(1186): n is a, c, g, or t
  misc_feature (1189)..(1189): n is a, c, g, or t
  misc_feature (1197)..(1199): n is a, c, g, or t
  misc_feature (1201)..(1201): n is a, c, g, or t
  misc_feature (1210)..(1210): n is a, c, g, or t
  misc_feature (1218)..(1219): n is a, c, g, or t
  misc_feature (1226)..(1226): n is a, c, g, or t
  misc_feature (1238)..(1238): n is a, c, g, or t
  misc_feature (1245)..(1245): n is a, c, g, or t
  misc_feature (1250)..(1250): n is a, c, g, or t
  misc_feature (1253)..(1253): n is a, c, g, or t
  misc_feature (1268)..(1268): n is a, c, g, or t
  misc_feature (1273)..(1273): n is a, c, g, or t
  misc_feature (1280)..(1280): n is a, c, g, or t
  misc_feature (1283)..(1284): n is a, c, g, or t
  misc_feature (1286)..(1290): n is a, c, g, or t
  misc_feature (1307)..(1307): n is a, c, g, or t
  misc_feature (1310)..(1310): n is a, c, g, or t
  misc_feature (1319)..(1319): n is a, c, g, or t
  misc_feature (1322)..(1322): n is a, c, g, or t
  misc_feature (1326)..(1326): n is a, c, g, or t
  misc_feature (1328)..(1328): n is a, c, g, or t
  misc_feature (1331)..(1331): n is a, c, g, or t
  misc_feature (1336)..(1336): n is a, c, g, or t
  misc_feature (1338)..(1340): n is a, c, g, or t
  misc_feature (1343)..(1343): n is a, c, g, or t
  misc_feature (1345)..(1346): n is a, c, g, or t
  misc_feature (1352)..(1355): n is a, c, g, or t
  misc_feature (1363)..(1366): n is a, c, g, or t
  misc_feature (1370)..(1370): n is a, c, g, or t
  misc_feature (1372)..(1372): n is a, c, g, or t
  misc_feature (1375)..(1375): n is a, c, g, or t
  misc_feature (1378)..(1378): n is a, c, g, or t
  misc_feature (1384)..(1384): n is a, c, g, or t
  misc_feature (1387)..(1387): n is a, c, g, or t
  misc_feature (1389)..(1391): n is a, c, g, or t
  misc_feature (1394)..(1394): n is a, c, g, or t
agagagattactatgagaggatcgcatcaccatcaccatcacggatcctatttaggtgacactatagaatcgtcgacccacgcgtccgcagggacactccttccatctgcccatgccatagagagggagttcaggattatgaaagcccttgcaaatgctggagtacctgtccctaacgttcttgatctctgtgaagattcaagtgtcattggcacccccttctatgtgatggagtactgcccaggtctcatctacaaagacccttccctgccaggcttggagcccagccacagacgagccatatacactgccatgaacacagtcctgtgcaaaattcacagtgtggatctgcaggctgtgggacttgaagactatgggaagcaaggggactatattccacgccaggtacgaacctgggttaagcagtatcgagcttccgaaactagcaccatcccagccatggagaggctgatcgaatggctgcccctccatcttccccgtcagcagaggaccacagtggtgcacggggacttcaggctcgacaacctggtgtttcatccagaagagccagaggtgcttgctgtccttgactgggaactttctaccttgggcgacccccttgctgatgtggcctacagctgcctggctcattacctgccatccagttttcccgtgctgagaggtattaatgactgtgacttgacacagctgggaatccctgctgcagaggagtatttcaggatgtactgtctccaaatggggctccctcccactgagaactggaacttctatatggctttttcctttttccgtgtggctgcaatcctacagggagtctacaagcgatcactcacagggcaagcaagctccacatatgcggnaacaactggaaagctgaccgaaatttgtgtctaacctggngggggatttcncagtcnaanaagggttccgggntttncaaaaanatgcccttcnaaatccgttaanaggtcctaccnacgtgggcnaggcccantcccantggnggcccccaaggcagcaggattnaagctccgtnccaaancttccccactcaanccnaangggnggtnggntatccnccaaannccccnccccctgncaaaanctgtatcncgggngaaacanttnnggaanaacgggttncctgaaaacnaaattgcaaaanccnagcctccnnncnggggaaccncccctgtnnaaacccnggaaaacccaancggaggntttgnacntttccccttaagggnttccnaaaaaanggnngnnnnncggggaaaccctttganccnggccccttnccnaaananttnccccnannnaananntgggannnnaaaaaaannnntttntnggnaancctttnaancnnnctncaa

SEQ ID NO: 930 - DNA, 1432 bp, Homo Sapiens
  misc_feature (580)..(580): n is a, c, g, or t
  misc_feature (589)..(590): n is a, c, g, or t
  misc_feature (594)..(594): n is a, c, g, or t
  misc_feature (598)..(599): n is a, c, g, or t
  misc_feature (603)..(603): n is a, c, g, or t
  misc_feature (605)..(605): n is a, c, g, or t
  misc_feature (607)..(607): n is a, c, g, or t
  misc_feature (617)..(617): n is a, c, g, or t
  misc_feature (625)..(625): n is a, c, g, or t
  misc_feature (631)..(631): n is a, c, g, or t
  misc_feature (641)..(641): n is a, c, g, or t
  misc_feature (644)..(644): n is a, c, g, or t
  misc_feature (646)..(647): n is a, c, g, or t
  misc_feature (650)..(650): n is a, c, g, or t
  misc_feature (653)..(654): n is a, c, g, or t
  misc_feature (661)..(661): n is a, c, g, or t
  misc_feature (669)..(669): n is a, c, g, or t
  misc_feature (676)..(676): n is a, c, g, or t
  misc_feature (678)..(678): n is a, c, g, or t
  misc_feature (682)..(683): n is a, c, g, or t
  misc_feature (692)..(692): n is a, c, g, or t
  misc_feature (694)..(695): n is a, c, g, or t
  misc_feature (697)..(698): n is a, c, g, or t
  misc_feature (701)..(701): n is a, c, g, or t
  misc_feature (710)..(710): n is a, c, g, or t
  misc_feature (722)..(722): n is a, c, g, or t
  misc_feature (724)..(724): n is a, c, g, or t
  misc_feature (727)..(728): n is a, c, g, or t
  misc_feature (731)..(731): n is a, c, g, or t
  misc_feature (743)..(743): n is a, c, g, or t
  misc_feature (746)..(746): n is a, c, g, or t
  misc_feature (761)..(761): n is a, c, g, or t
  misc_feature (767)..(767): n is a, c, g, or t
  misc_feature (770)..(770): n is a, c, g, or t
  misc_feature (786)..(786): n is a, c, g, or t
  misc_feature (788)..(788): n is a, c, g, or t
  misc_feature (794)..(794): n is a, c, g, or t
  misc_feature (799)..(799): n is a, c, g, or t
  misc_feature (804)..(804): n is a, c, g, or t
  misc_feature (806)..(806): n is a, c, g, or t
  misc_feature (809)..(810): n is a, c, g, or t
  misc_feature (812)..(812): n is a, c, g, or t
  misc_feature (814)..(815): n is a, c, g, or t
  misc_feature (819)..(819): n is a, c, g, or t
  misc_feature (822)..(824): n is a, c, g, or t
  misc_feature (826)..(826): n is a, c, g, or t
  misc_feature (828)..(829): n is a, c, g, or t
  misc_feature (833)..(833): n is a, c, g, or t
  misc_feature (836)..(836): n is a, c, g, or t
  misc_feature (839)..(839): n is a, c, g, or t
  misc_feature (859)..(862): n is a, c, g, or t
  misc_feature (865)..(865): n is a, c, g, or t
  misc_feature (869)..(869): n is a, c, g, or t
  misc_feature (872)..(874): n is a, c, g, or t
  misc_feature (878)..(878): n is a, c, g, or t
  misc_feature (880)..(880): n is a, c, g, or t
  misc_feature (883)..(883): n is a, c, g, or t
  misc_feature (892)..(892): n is a, c, g, or t
  misc_feature (895)..(896): n is a, c, g, or t
  misc_feature (898)..(899): n is a, c, g, or t
  misc_feature (910)..(910): n is a, c, g, or t
  misc_feature (913)..(913): n is a, c, g, or t
  misc_feature (927)..(927): n is a, c, g, or t
  misc_feature (931)..(932): n is a, c, g, or t
  misc_feature (944)..(944): n is a, c, g, or t
  misc_feature (955)..(955): n is a, c, g, or t
  misc_feature (959)..(959): n is a, c, g, or t
  misc_feature (964)..(964): n is a, c, g, or t
  misc_feature (967)..(967): n is a, c, g, or t
  misc_feature (975)..(975): n is a, c, g, or t
  misc_feature (989)..(989): n is a, c, g, or t
  misc_feature (996)..(996): n is a, c, g, or t
  misc_feature (1002)..(1002): n is a, c, g, or t
  misc_feature (1004)..(1004): n is a, c, g, or t
  misc_feature (1015)..(1015): n is a, c, g, or t
  misc_feature (1019)..(1019): n is a, c, g, or t
  misc_feature (1021)..(1021): n is a, c, g, or t
  misc_feature (1025)..(1025): n is a, c, g, or t
  misc_feature (1029)..(1029): n is a, c, g, or t
  misc_feature (1036)..(1037): n is a, c, g, or t
  misc_feature (1039)..(1039): n is a, c, g, or t
  misc_feature (1041)..(1041): n is a, c, g, or t
  misc_feature (1052)..(1052): n is a, c, g, or t
  misc_feature (1057)..(1057): n is a, c, g, or t
  misc_feature (1068)..(1068): n is a, c, g, or t
  misc_feature (1072)..(1074): n is a, c, g, or t
  misc_feature (1076)..(1076): n is a, c, g, or t
  misc_feature (1079)..(1080): n is a, c, g, or t
  misc_feature (1082)..(1082): n is a, c, g, or t
  misc_feature (1085)..(1085): n is a, c, g, or t
  misc_feature (1102)..(1102): n is a, c, g, or t
  misc_feature (1112)..(1114): n is a, c, g, or t
  misc_feature (1118)..(1118): n is a, c, g, or t
  misc_feature (1120)..(1121): n is a, c, g, or t
  misc_feature (1126)..(1126): n is a, c, g, or t
  misc_feature (1128)..(1128): n is a, c, g, or t
  misc_feature (1130)..(1131): n is a, c, g, or t
  misc_feature (1137)..(1137): n is a, c, g, or t
  misc_feature (1145)..(1145): n is a, c, g, or t
  misc_feature (1147)..(1147): n is a, c, g, or t
  misc_feature (1158)..(1158): n is a, c, g, or t
  misc_feature (1163)..(1163): n is a, c, g, or t
  misc_feature (1165)..(1166): n is a, c, g, or t
  misc_feature (1168)..(1168): n is a, c, g, or t
  misc_feature (1171)..(1171): n is a, c, g, or t
  misc_feature (1177)..(1177): n is a, c, g, or t
  misc_feature (1189)..(1189): n is a, c, g, or t
  misc_feature (1193)..(1193): n is a, c, g, or t
  misc_feature (1212)..(1213): n is a, c, g, or t
  misc_feature (1222)..(1222): n is a, c, g, or t
  misc_feature (1226)..(1229): n is a, c, g, or t
  misc_feature (1233)..(1235): n is a, c, g, or t
  misc_feature (1239)..(1239): n is a, c, g, or t
  misc_feature (1244)..(1244): n is a, c, g, or t
  misc_feature (1247)..(1247): n is a, c, g, or t
  misc_feature (1252)..(1252): n is a, c, g, or t
  misc_feature (1254)..(1254): n is a, c, g, or t
  misc_feature (1267)..(1267): n is a, c, g, or t
  misc_feature (1269)..(1269): n is a, c, g, or t
  misc_feature (1271)..(1271): n is a, c, g, or t
  misc_feature (1279)..(1279): n is a, c, g, or t
  misc_feature (1281)..(1282): n is a, c, g, or t
  misc_feature (1289)..(1289): n is a, c, g, or t
  misc_feature (1296)..(1297): n is a, c, g, or t
  misc_feature (1299)..(1299): n is a, c, g, or t
  misc_feature (1304)..(1304): n is a, c, g, or t
  misc_feature (1312)..(1312): n is a, c, g, or t
  misc_feature (1314)..(1314): n is a, c, g, or t
  misc_feature (1320)..(1320): n is a, c, g, or t
  misc_feature (1329)..(1329): n is a, c, g, or t
  misc_feature (1334)..(1334): n is a, c, g, or t
  misc_feature (1337)..(1338): n is a, c, g, or t
  misc_feature (1348)..(1348): n is a, c, g, or t
  misc_feature (1351)..(1351): n is a, c, g, or t
  misc_feature (1355)..(1355): n is a, c, g, or t
  misc_feature (1358)..(1360): n is a, c, g, or t
  misc_feature (1362)..(1363): n is a, c, g, or t
  misc_feature (1366)..(1366): n is a, c, g, or t
  misc_feature (1368)..(1369): n is a, c, g, or t
  misc_feature (1373)..(1373): n is a, c, g, or t
  misc_feature (1376)..(1376): n is a, c, g, or t
  misc_feature (1379)..(1382): n is a, c, g, or t
  misc_feature (1391)..(1391): n is a, c, g, or t
  misc_feature (1393)..(1397): n is a, c, g, or t
  misc_feature (1399)..(1400): n is a, c, g, or t
  misc_feature (1403)..(1404): n is a, c, g, or t
  misc_feature (1410)..(1413): n is a, c, g, or t
  misc_feature (1419)..(1419): n is a, c, g, or t
  misc_feature (1425)..(1425): n is a, c, g, or t
  misc_feature (1432)..(1432): n is a, c, g, or t
agagattactatgagaggatcgcatcaccatcaccatcacggatcctatttaggtgacactatagaatcgtcgacccacgcgtccggccttttctccagcaaggagtcagcatgcccccctcagggtcccaagctccctcactgccaccggagactgtgtggcccccacgtctccccatctacctctacccttaacctgtttctgagccacggagacagggaggaaggagcgcgacagtgccacctgttgggcatcataaatgcccctgcagcccatgggggaggagatggggaagtggagccaccctgcctctgcagggcaaggcagggcctgccccagtggggcttgggaccatctcgaaccaccagcgtggagaagcagaagcaaaagcactcgccaggctgcagcctcaggcactggcaggggctggtgcggccccactcccctcccccgctcccatttgtgcccatcctgttgtgaccaaccccgttttaaacatgtttcaatagatccaaaaaaaaaaaaaaaaaaaaaaaaaaaaaaaaaaaaaaaaaaaaaaaaaaaaaaagtcggccaaanccaaaaaannaaanaaannaagntnanttacctcacnttggaaancctgtnaaggggtccngtncnnaantgnnaactccntttggatnttttcananaccnngggaatccngnngnnaanatttttaanggaacacaaaancnccnnggntgttttttattnacnggaaatttaccaccnaatttnttnaatttaaaaaaattcnanaaaccnctggnggaananttnnananngggnaannnancnnaaanttnttnaaaaaaatttccgggggatnnnnccnaccnttnnntatnanccnaaagggttncannannaaaaatttttnggnttttttaaaaaccngttnntaaaaaataaanccaaaaatttnaaancccgnccnttaaatanaaagcctttttttnaaaaaanggaaananaaaaaaaaaantttntntttnacanggaaatnnantnaaaattttttnaaggnaaaaaaatccncccnnnanttnnanttnacaaaaaaaaacgaaancttttaattnnnaaangnntaaancnannaaaatntttttccngnaaaaaaaaaanatttntnntnggngggggnaaaaaaaaaacnattnctttttttttaaagaattnnaaaaaaaantttnnnntagnnnaaancaganaanttttncnaaggtttataaanangntttttccnanntttccgngggattnncnatttntttaaacncnaaaaanaaaatattncccgnttnncgggaattantangagnaannntnnaananntaanatntannnnaataaaaancnnnnnannttnnaaaaannnncttaangggggngcttttn

SEQ ID NO: 931 - DNA, 1429 bp, Homo Sapiens
  misc_feature (807)..(807): n is a, c, g, or t
  misc_feature (849)..(849): n is a, c, g, or t
  misc_feature (905)..(905): n is a, c, g, or t
  misc_feature (928)..(928): n is a, c, g, or t
  misc_feature (933)..(936): n is a, c, g, or t
  misc_feature (938)..(965): n is a, c, g, or t
  misc_feature (969)..(969): n is a, c, g, or t
  misc_feature (979)..(979): n is a, c, g, or t
  misc_feature (988)..(988): n is a, c, g, or t
  misc_feature (990)..(990): n is a, c, g, or t
  misc_feature (993)..(993): n is a, c, g, or t
  misc_feature (997)..(997): n is a, c, g, or t
  misc_feature (1003)..(1003): n is a, c, g, or t
  misc_feature (1006)..(1006): n is a, c, g, or t
  misc_feature (1016)..(1016): n is a, c, g, or t
  misc_feature (1025)..(1025): n is a, c, g, or t
  misc_feature (1031)..(1032): n is a, c, g, or t
  misc_feature (1035)..(1035): n is a, c, g, or t
  misc_feature (1046)..(1046): n is a, c, g, or t
  misc_feature (1076)..(1076): n is a, c, g, or t
  misc_feature (1087)..(1087): n is a, c, g, or t
  misc_feature (1092)..(1092): n is a, c, g, or t
  misc_feature (1105)..(1105): n is a, c, g, or t
  misc_feature (1109)..(1110): n is a, c, g, or t
  misc_feature (1112)..(1112): n is a, c, g, or t
  misc_feature (1114)..(1114): n is a, c, g, or t
  misc_feature (1116)..(1116): n is a, c, g, or t
  misc_feature (1118)..(1119): n is a, c, g, or t
  misc_feature (1121)..(1121): n is a, c, g, or t
  misc_feature (1125)..(1125): n is a, c, g, or t
  misc_feature (1132)..(1132): n is a, c, g, or t
  misc_feature (1136)..(1136): n is a, c, g, or t
  misc_feature (1146)..(1146): n is a, c, g, or t
  misc_feature (1160)..(1163): n is a, c, g, or t
  misc_feature (1167)..(1167): n is a, c, g, or t
  misc_feature (1169)..(1169): n is a, c, g, or t
  misc_feature (1173)..(1173): n is a, c, g, or t
  misc_feature (1175)..(1176): n is a, c, g, or t
  misc_feature (1188)..(1189): n is a, c, g, or t
  misc_feature (1192)..(1193): n is a, c, g, or t
  misc_feature (1202)..(1202): n is a, c, g, or t
  misc_feature (1210)..(1211): n is a, c, g, or t
  misc_feature (1214)..(1219): n is a, c, g, or t
  misc_feature (1221)..(1222): n is a, c, g, or t
  misc_feature (1224)..(1224): n is a, c, g, or t
  misc_feature (1228)..(1229): n is a, c, g, or t
  misc_feature (1239)..(1240): n is a, c, g, or t
  misc_feature (1242)..(1244): n is a, c, g, or t
  misc_feature (1251)..(1252): n is a, c, g, or t
  misc_feature (1255)..(1255): n is a, c, g, or t
  misc_feature (1264)..(1265): n is a, c, g, or t
  misc_feature (1276)..(1276): n is a, c, g, or t
  misc_feature (1285)..(1286): n is a, c, g, or t
  misc_feature (1290)..(1290): n is a, c, g, or t
  misc_feature (1292)..(1292): n is a, c, g, or t
  misc_feature (1298)..(1298): n is a, c, g, or t
  misc_feature (1301)..(1302): n is a, c, g, or t
  misc_feature (1304)..(1304): n is a, c, g, or t
  misc_feature (1307)..(1309): n is a, c, g, or t
  misc_feature (1312)..(1312): n is a, c, g, or t
  misc_feature (1319)..(1321): n is a, c, g, or t
  misc_feature (1326)..(1326): n is a, c, g, or t
  misc_feature (1328)..(1329): n is a, c, g, or t
  misc_feature (1334)..(1334): n is a, c, g, or t
  misc_feature (1339)..(1339): n is a, c, g, or t
  misc_feature (1341)..(1341): n is a, c, g, or t
  misc_feature (1343)..(1343): n is a, c, g, or t
  misc_feature (1346)..(1346): n is a, c, g, or t
  misc_feature (1348)..(1348): n is a, c, g, or t
  misc_feature (1363)..(1363): n is a, c, g, or t
  misc_feature (1365)..(1365): n is a, c, g, or t
  misc_feature (1367)..(1367): n is a, c, g, or t
  misc_feature (1375)..(1378): n is a, c, g, or t
  misc_feature (1382)..(1383): n is a, c, g, or t
  misc_feature (1386)..(1386): n is a, c, g, or t
  misc_feature (1388)..(1388): n is a, c, g, or t
  misc_feature (1396)..(1397): n is a, c, g, or t
  misc_feature (1400)..(1401): n is a, c, g, or t
  misc_feature (1410)..(1411): n is a, c, g, or t
  misc_feature (1414)..(1417): n is a, c, g, or t
  misc_feature (1419)..(1421): n is a, c, g, or t
  misc_feature (1423)..(1423): n is a, c, g, or t
  misc_feature (1427)..(1427): n is a, c, g, or t
agagagattactatgagaggatcgcatcaccatcaccatcacggatcctatttaggtgacactatagaatcgtcgacccacgcgtccggcggcaaccgcgtctcctgcatgtatgttcgctgcgtgcctggtgccaggtacacggtcctcttctcgcacggcaatgccgtggacctgggccagatgagcagcttctacattggcctgggctcccgcctccactgcaacatcttctcctacgactactccggctacggtgccagctcgggcaggccttccgagaggaacctctatgccgacatcgacgccgcctggcaggccctgcgcaccagagcatcggcacggtgcccaccgtggacctggcctcgcgctacgagtgtgccgcggtggtgctgcactcgccgctcacctcgggcatgcgcgtcgccttccccgacaccaagaagacctactgcttcgacgccttccctaacatcgagaaggtgtccaagatcacgtctcccgtgctcatcatccacggcacggaggacgaggtgatcgacttctcgcacgggctggcgctctacgagcgctgccccaaggcggtggagccgctgtgggtggagggcgccgggcacaacgacatcgagctctacagccagtacctggagcgcctgcgtcgcttcatctcccaggagctgcccagccagcgcgcctagcggcggccccaaccggccggacctcagcaataaggcggcccccggacctcaccccgcgccggcccccacccaggggctgcatgtggaccccccgggcggcccaggggancccgccccgacccaggggctgtggacgatgtacaggcaacanagctacgcactcctttccttttggaagcaagaaaaaaatacgtgaaaaacggaaanttaaaaatttaaatttttaaaanaaaannnnannnnnnnnnnnnnnnnnnnnnnnnnnnngggnggccgctccnaaagggaancnaantaancttaantanctgaacttgnactcctgtnaaaaannccntaatgaccccnaaactcccttttggattttttcaaaacctnggttgcccccnggggnttttttttggggnaaanncnancnanntngggnaattttngggnctaaggaacntaaagggaaaaaannnntggnanaccncnnttaaatttccannggnncaaaaaaantttggggnnttnnnnnntnncnaggnncaaaaaaaanntnnnggaattnngcnttttaaaannaaaaaaaaaanaatttttcnncttntnattttnccnnanaannnccnaattttnnnaaaangnngggangaaantncnttnanttttaaaaaattttntngnaaaaaaannnntttnnttnangggggaannccnnattaaattnnccnnnntnnnanaaancc

SEQ ID NO: 932 - DNA, 1523 bp, Homo Sapiens
  misc_feature (5)..(5): n is a, c, g, or t
  misc_feature (109)..(109): n is a, c, g, or t
  misc_feature (353)..(353): n is a, c, g, or t
  misc_feature (454)..(454): n is a, c, g, or t
  misc_feature (493)..(493): n is a, c, g, or t
  misc_feature (513)..(513): n is a, c, g, or t
  misc_feature (524)..(524): n is a, c, g, or t
  misc_feature (526)..(526): n is a, c, g, or t
  misc_feature (539)..(539): n is a, c, g, or t
  misc_feature (542)..(542): n is a, c, g, or t
  misc_feature (552)..(552): n is a, c, g, or t
  misc_feature (561)..(561): n is a, c, g, or t
  misc_feature (588)..(589): n is a, c, g, or t
  misc_feature (605)..(605): n is a, c, g, or t
  misc_feature (615)..(615): n is a, c, g, or t
  misc_feature (617)..(618): n is a, c, g, or t
  misc_feature (632)..(632): n is a, c, g, or t
  misc_feature (637)..(637): n is a, c, g, or t
  misc_feature (639)..(639): n is a, c, g, or t
  misc_feature (641)..(641): n is a, c, g, or t
  misc_feature (668)..(668): n is a, c, g, or t
  misc_feature (674)..(674): n is a, c, g, or t
  misc_feature (676)..(676): n is a, c, g, or t
  misc_feature (686)..(686): n is a, c, g, or t
  misc_feature (697)..(698): n is a, c, g, or t
  misc_feature (714)..(714): n is a, c, g, or t
  misc_feature (719)..(719): n is a, c, g, or t
  misc_feature (723)..(723): n is a, c, g, or t
  misc_feature (727)..(728): n is a, c, g, or t
  misc_feature (730)..(730): n is a, c, g, or t
  misc_feature (740)..(740): n is a, c, g, or t
  misc_feature (749)..(750): n is a, c, g, or t
  misc_feature (753)..(753): n is a, c, g, or t
  misc_feature (761)..(762): n is a, c, g, or t
  misc_feature (765)..(767): n is a, c, g, or t
  misc_feature (770)..(770): n is a, c, g, or t
  misc_feature (776)..(776): n is a, c, g, or t
  misc_feature (780)..(781): n is a, c, g, or t
  misc_feature (794)..(794): n is a, c, g, or t
  misc_feature (798)..(798): n is a, c, g, or t
  misc_feature (800)..(801): n is a, c, g, or t
  misc_feature (805)..(807): n is a, c, g, or t
  misc_feature (811)..(812): n is a, c, g, or t
  misc_feature (815)..(815): n is a, c, g, or t
  misc_feature (817)..(818): n is a, c, g, or t
  misc_feature (820)..(820): n is a, c, g, or t
  misc_feature (822)..(822): n is a, c, g, or t
  misc_feature (828)..(828): n is a, c, g, or t
  misc_feature (830)..(830): n is a, c, g, or t
  misc_feature (832)..(832): n is a, c, g, or t
  misc_feature (834)..(834): n is a, c, g, or t
  misc_feature (836)..(838): n is a, c, g, or t
  misc_feature (848)..(848): n is a, c, g, or t
  misc_feature (856)..(856): n is a, c, g, or t
  misc_feature (869)..(869): n is a, c, g, or t
  misc_feature (871)..(873): n is a, c, g, or t
  misc_feature (878)..(878): n is a, c, g, or t
  misc_feature (881)..(881): n is a, c, g, or t
  misc_feature (883)..(883): n is a, c, g, or t
  misc_feature (888)..(888): n is a, c, g, or t
  misc_feature (890)..(890): n is a, c, g, or t
  misc_feature (893)..(893): n is a, c, g, or t
  misc_feature (895)..(895): n is a, c, g, or t
  misc_feature (900)..(900): n is a, c, g, or t
  misc_feature (906)..(906): n is a, c, g, or t
  misc_feature (908)..(908): n is a, c, g, or t
  misc_feature (915)..(915): n is a, c, g, or t
  misc_feature (917)..(917): n is a, c, g, or t
  misc_feature (919)..(920): n is a, c, g, or t
  misc_feature (928)..(929): n is a, c, g, or t
  misc_feature (931)..(931): n is a, c, g, or t
  misc_feature (934)..(934): n is a, c, g, or t
  misc_feature (937)..(937): n is a, c, g, or t
  misc_feature (944)..(944): n is a, c, g, or t
  misc_feature (946)..(946): n is a, c, g, or t
  misc_feature (952)..(952): n is a, c, g, or t
  misc_feature (954)..(954): n is a, c, g, or t
  misc_feature (961)..(961): n is a, c, g, or t
  misc_feature (964)..(964): n is a, c, g, or t
  misc_feature (977)..(978): n is a, c, g, or t
  misc_feature (990)..(990): n is a, c, g, or t
  misc_feature (995)..(995): n is a, c, g, or t
  misc_feature (1000)..(1002): n is a, c, g, or t
  misc_feature (1005)..(1005): n is a, c, g, or t
  misc_feature (1014)..(1014): n is a, c, g, or t
  misc_feature (1019)..(1020): n is a, c, g, or t
  misc_feature (1024)..(1024): n is a, c, g, or t
  misc_feature (1029)..(1030): n is a, c, g, or t
  misc_feature (1035)..(1036): n is a, c, g, or t
  misc_feature (1039)..(1040): n is a, c, g, or t
  misc_feature (1045)..(1045): n is a, c, g, or t
  misc_feature (1051)..(1052): n is a, c, g, or t
  misc_feature (1058)..(1058): n is a, c, g, or t
  misc_feature (1067)..(1067): n is a, c, g, or t
  misc_feature (1069)..(1070): n is a, c, g, or t
  misc_feature (1082)..(1083): n is a, c, g, or t
  misc_feature (1087)..(1087): n is a, c, g, or t
  misc_feature (1096)..(1096): n is a, c, g, or t
  misc_feature (1099)..(1100): n is a, c, g, or t
  misc_feature (1107)..(1107): n is a, c, g, or t
  misc_feature (1109)..(1109): n is a, c, g, or t
  misc_feature (1124)..(1124): n is a, c, g, or t
  misc_feature (1128)..(1128): n is a, c, g, or t
  misc_feature (1132)..(1133): n is a, c, g, or t
  misc_feature (1135)..(1135): n is a, c, g, or t
  misc_feature (1140)..(1141): n is a, c, g, or t
  misc_feature (1144)..(1144): n is a, c, g, or t
  misc_feature (1152)..(1152): n is a, c, g, or t
  misc_feature (1157)..(1157): n is a, c, g, or t
  misc_feature (1159)..(1159): n is a, c, g, or t
  misc_feature (1166)..(1166): n is a, c, g, or t
  misc_feature (1168)..(1168): n is a, c, g, or t
  misc_feature (1173)..(1174): n is a, c, g, or t
  misc_feature (1176)..(1176): n is a, c, g, or t
  misc_feature (1179)..(1179): n is a, c, g, or t
  misc_feature (1184)..(1184): n is a, c, g, or t
  misc_feature (1190)..(1190): n is a, c, g, or t
  misc_feature (1193)..(1193): n is a, c, g, or t
  misc_feature (1195)..(1196): n is a, c, g, or t
  misc_feature (1198)..(1198): n is a, c, g, or t
  misc_feature (1200)..(1200): n is a, c, g, or t
  misc_feature (1203)..(1205): n is a, c, g, or t
  misc_feature (1207)..(1207): n is a, c, g, or t
  misc_feature (1210)..(1210): n is a, c, g, or t
  misc_feature (1212)..(1212): n is a, c, g, or t
  misc_feature (1214)..(1214): n is a, c, g, or t
  misc_feature (1218)..(1218): n is a, c, g, or t
  misc_feature (1222)..(1222): n is a, c, g, or t
  misc_feature (1226)..(1226): n is a, c, g, or t
  misc_feature (1229)..(1229): n is a, c, g, or t
  misc_feature (1231)..(1232): n is a, c, g, or t
  misc_feature (1239)..(1239): n is a, c, g, or t
  misc_feature (1241)..(1241): n is a, c, g, or t
  misc_feature (1246)..(1247): n is a, c, g, or t
  misc_feature (1250)..(1250): n is a, c, g, or t
  misc_feature (1254)..(1254): n is a, c, g, or t
  misc_feature (1262)..(1262): n is a, c, g, or t
  misc_feature (1266)..(1267): n is a, c, g, or t
  misc_feature (1277)..(1277): n is a, c, g, or t
  misc_feature (1280)..(1280): n is a, c, g, or t
  misc_feature (1288)..(1288): n is a, c, g, or t
  misc_feature (1291)..(1291): n is a, c, g, or t
  misc_feature (1293)..(1294): n is a, c, g, or t
  misc_feature (1299)..(1300): n is a, c, g, or t
  misc_feature (1304)..(1304): n is a, c, g, or t
  misc_feature (1309)..(1309): n is a, c, g, or t
  misc_feature (1314)..(1314): n is a, c, g, or t
  misc_feature (1320)..(1320): n is a, c, g, or t
  misc_feature (1326)..(1326): n is a, c, g, or t
  misc_feature (1335)..(1337): n is a, c, g, or t
  misc_feature (1345)..(1345): n is a, c, g, or t
  misc_feature (1353)..(1353): n is a, c, g, or t
  misc_feature (1358)..(1358): n is a, c, g, or t
  misc_feature (1361)..(1361): n is a, c, g, or t
  misc_feature (1363)..(1363): n is a, c, g, or t
  misc_feature (1366)..(1366): n is a, c, g, or t
  misc_feature (1378)..(1378): n is a, c, g, or t
  misc_feature (1383)..(1383): n is a, c, g, or t
  misc_feature (1385)..(1385): n is a, c, g, or t
  misc_feature (1393)..(1394): n is a, c, g, or t
  misc_feature (1396)..(1396): n is a, c, g, or t
  misc_feature (1409)..(1411): n is a, c, g, or t
  misc_feature (1421)..(1421): n is a, c, g, or t
  misc_feature (1430)..(1430): n is a, c, g, or t
  misc_feature (1438)..(1438): n is a, c, g, or t
  misc_feature (1441)..(1441): n is a, c, g, or t
  misc_feature (1450)..(1450): n is a, c, g, or t
  misc_feature (1453)..(1453): n is a, c, g, or t
  misc_feature (1463)..(1463): n is a, c, g, or t
  misc_feature (1467)..(1467): n is a, c, g, or t
  misc_feature (1469)..(1469): n is a, c, g, or t
  misc_feature (1473)..(1474): n is a, c, g, or t
  misc_feature (1478)..(1478): n is a, c, g, or t
  misc_feature (1483)..(1483): n is a, c, g, or t
  misc_feature (1486)..(1486): n is a, c, g, or t
  misc_feature (1494)..(1495): n is a, c, g, or t
  misc_feature (1502)..(1502): n is a, c, g, or t
  misc_feature (1506)..(1506): n is a, c, g, or t
  misc_feature (1514)..(1514): n is a, c, g, or t
  misc_feature (1521)..(1521): n is a, c, g, or t
  misc_feature (1523)..(1523): n is a, c, g, or t
acaanagagagaattactatgagaggatcgcatcaccatccccatcacggatcctatttaggtgacactatagaatcgtcgacccacgcgtccggcttcaccaccgggnatgcaggcggcccggggggcctgggcctcccctcacatgctgcaagaccctccactgacttcacgcaagcggcagctgctgcagctgtggctgctgcggcagccactgccaccgccacagccacagccaccgtggctgctctccaggagaagcagagccaggagctgagccagtatggagcgatgggggccggacagtcttttaacagccagtttctgcagcatggaggtccccgggggcctantgtccccgctggcatgaaccctactggcataggaggggtaatgggcccctctggcctctcccccttggctatgaaccccacccgggcagcatgaatgacanccttgtatgcagggcagcgtctgccccaacatgggtatnctgggcctccccaggcccanccactgccccnanagggggtcaaganaanctactctgangtgtatccncgggcagcagtatctgcaaggaggccnntatgcacccagcaacncccagtttgngnncagccctgggcagnccccngncncctcccccttactaccctgggcacaanctgccncntgcaacatgncatgacccagnnccctgtccgtacctgnccccntcgnaganngncatttttaancctaacctnnttntattcttnnagnnnatncccagnttcnncaactttccatcnaaancnnatcnnncatnntantnntncncaaaanananancnnnccccatttanatactaanataaacaaaaaangnnnaaatnctncnttttntnccntnatatntcaaancnagaaatncnanntccctttnnanttnatncttcctnangaaaancntgacccnttntaaaccaacttgnngataataaaccntctcnttatnnnccnatgaagttnatcannttancactnnttctnnttnnaaaancaaatnnttcttnttaatcccntnnttttctattcannttgnacaaaaaanaannctaaaananccctgatagaattanaacntaanntnaaaannttncttttatnagttncnttacaancntattnncnaanaaatnaaaacntanannananctnnncnatnananaaanagtnagangcncnntactctnanaaaanncanagangaagtaanaacnncaccttccanaancttatctnatntnnaatcnnaatnctcancaaantaatanaaatanaaaagcctnnnacatatanttaacatnttcanacncnttntttctactaatnaaccncnatttatanncnccctcttacttannnacatctactntaaacctcnccttcgtncantatagtacnatnacatatatanaaananatcnntatntaatnccntaattatnntattatnactntagaaaantataaanan

SEQ ID NO: 933 - DNA, 1604 bp, Homo Sapiens
  misc_feature (1)..(2): n is a, c, g, or t
  misc_feature (4)..(6): n is a, c, g, or t
  misc_feature (9)..(9): n is a, c, g, or t
  misc_feature (11)..(11): n is a, c, g, or t
  misc_feature (13)..(13): n is a, c, g, or t
  misc_feature (17)..(18): n is a, c, g, or t
  misc_feature (20)..(20): n is a, c, g, or t
  misc_feature (28)..(28): n is a, c, g, or t
  misc_feature (31)..(31): n is a, c, g, or t
  misc_feature (38)..(39): n is a, c, g, or t
  misc_feature (42)..(42): n is a, c, g, or t
  misc_feature (47)..(47): n is a, c, g, or t
  misc_feature (52)..(52): n is a, c, g, or t
  misc_feature (54)..(54): n is a, c, g, or t
  misc_feature (57)..(58): n is a, c, g, or t
  misc_feature (61)..(61): n is a, c, g, or t
  misc_feature (63)..(63): n is a, c, g, or t
  misc_feature (65)..(65): n is a, c, g, or t
  misc_feature (67)..(67): n is a, c, g, or t
  misc_feature (74)..(74): n is a, c, g, or t
  misc_feature (77)..(77): n is a, c, g, or t
  misc_feature (85)..(87): n is a, c, g, or t
  misc_feature (95)..(95): n is a, c, g, or t
  misc_feature (109)..(109): n is a, c, g, or t
  misc_feature (114)..(114): n is a, c, g, or t
  misc_feature (116)..(117): n is a, c, g, or t
  misc_feature (123)..(123): n is a, c, g, or t
  misc_feature (126)..(126): n is a, c, g, or t
  misc_feature (129)..(129): n is a, c, g, or t
  misc_feature (142)..(142): n is a, c, g, or t
  misc_feature (144)..(145): n is a, c, g, or t
  misc_feature (150)..(151): n is a, c, g, or t
  misc_feature (153)..(153): n is a, c, g, or t
  misc_feature (159)..(159): n is a, c, g, or t
  misc_feature (161)..(162): n is a, c, g, or t
  misc_feature (176)..(176): n is a, c, g, or t
  misc_feature (179)..(179): n is a, c, g, or t
  misc_feature (185)..(185): n is a, c, g, or t
  misc_feature (188)..(189): n is a, c, g, or t
  misc_feature (192)..(192): n is a, c, g, or t
  misc_feature (198)..(198): n is a, c, g, or t
  misc_feature (200)..(200): n is a, c, g, or t
  misc_feature (204)..(204): n is a, c, g, or t
  misc_feature (206)..(206): n is a, c, g, or t
  misc_feature (209)..(210): n is a, c, g, or t
  misc_feature (220)..(220): n is a, c, g, or t
  misc_feature (230)..(230): n is a, c, g, or t
  misc_feature (232)..(232): n is a, c, g, or t
  misc_feature (234)..(234): n is a, c, g, or t
  misc_feature (237)..(237): n is a, c, g, or t
  misc_feature (241)..(241): n is a, c, g, or t
  misc_feature (243)..(244): n is a, c, g, or t
  misc_feature (249)..(250): n is a, c, g, or t
  misc_feature (252)..(252): n is a, c, g, or t
  misc_feature (258)..(258): n is a, c, g, or t
  misc_feature (260)..(260): n is a, c, g, or t
  misc_feature (262)..(263): n is a, c, g, or t
  misc_feature (266)..(266): n is a, c, g, or t
  misc_feature (268)..(269): n is a, c, g, or t
  misc_feature (276)..(276): n is a, c, g, or t
  misc_feature (279)..(279): n is a, c, g, or t
  misc_feature (286)..(286): n is a, c, g, or t
  misc_feature (289)..(289): n is a, c, g, or t
  misc_feature (295)..(295): n is a, c, g, or t
  misc_feature (304)..(304): n is a, c, g, or t
  misc_feature (306)..(306): n is a, c, g, or t
  misc_feature (332)..(332): n is a, c, g, or t
  misc_feature (336)..(336): n is a, c, g, or t
  misc_feature (345)..(345): n is a, c, g, or t
  misc_feature (349)..(349): n is a, c, g, or t
  misc_feature (353)..(353): n is a, c, g, or t
  misc_feature (357)..(357): n is a, c, g, or t
  misc_feature (363)..(363): n is a, c, g, or t
  misc_feature (368)..(368): n is a, c, g, or t
  misc_feature (370)..(370): n is a, c, g, or t
  misc_feature (380)..(381): n is a, c, g, or t
  misc_feature (383)..(383): n is a, c, g, or t
  misc_feature (387)..(387): n is a, c, g, or t
  misc_feature (391)..(391): n is a, c, g, or t
  misc_feature (394)..(394): n is a, c, g, or t
  misc_feature (398)..(399): n is a, c, g, or t
  misc_feature (407)..(407): n is a, c, g, or t
  misc_feature (409)..(409): n is a, c, g, or t
  misc_feature (412)..(412): n is a, c, g, or t
  misc_feature (417)..(417): n is a, c, g, or t
  misc_feature (419)..(419): n is a, c, g, or t
  misc_feature (426)..(426): n is a, c, g, or t
  misc_feature (428)..(428): n is a, c, g, or t
  misc_feature (432)..(432): n is a, c, g, or t
  misc_feature (438)..(438): n is a, c, g, or t
  misc_feature (452)..(452): n is a, c, g, or t
  misc_feature (454)..(454): n is a, c, g, or t
  misc_feature (459)..(459): n is a, c, g, or t
  misc_feature (462)..(462): n is a, c, g, or t
  misc_feature (470)..(470): n is a, c, g, or t
  misc_feature (475)..(476): n is a, c, g, or t
  misc_feature (478)..(478): n is a, c, g, or t
  misc_feature (484)..(484): n is a, c, g, or t
  misc_feature (487)..(487): n is a, c, g, or t
  misc_feature (496)..(496): n is a, c, g, or t
  misc_feature (498)..(498): n is a, c, g, or t
  misc_feature (503)..(505): n is a, c, g, or t
  misc_feature (509)..(511): n is a, c, g, or t
  misc_feature (524)..(525): n is a, c, g, or t
  misc_feature (528)..(528): n is a, c, g, or t
  misc_feature (536)..(536): n is a, c, g, or t
  misc_feature (538)..(539): n is a, c, g, or t
  misc_feature (543)..(543): n is a, c, g, or t
  misc_feature (547)..(548): n is a, c, g, or t
  misc_feature (552)..(552): n is a, c, g, or t
  misc_feature (556)..(556): n is a, c, g, or t
  misc_feature (562)..(564): n is a, c, g, or t
  misc_feature (568)..(568): n is a, c, g, or t
  misc_feature (575)..(575): n is a, c, g, or t
  misc_feature (577)..(577): n is a, c, g, or t
  misc_feature (586)..(586): n is a, c, g, or t
  misc_feature (595)..(595): n is a, c, g, or t
  misc_feature (597)..(597): n is a, c, g, or t
  misc_feature (599)..(599): n is a, c, g, or t
  misc_feature (601)..(602): n is a, c, g, or t
  misc_feature (615)..(617): n is a, c, g, or t
  misc_feature (619)..(619): n is a, c, g, or t
  misc_feature (626)..(626): n is a, c, g, or t
  misc_feature (633)..(633): n is a, c, g, or t
  misc_feature (638)..(638): n is a, c, g, or t
  misc_feature (644)..(644): n is a, c, g, or t
  misc_feature (646)..(646): n is a, c, g, or t
  misc_feature (648)..(649): n is a, c, g, or t
  misc_feature (660)..(660): n is a, c, g, or t
  misc_feature (668)..(669): n is a, c, g, or t
  misc_feature (672)..(674): n is a, c, g, or t
  misc_feature (677)..(677): n is a, c, g, or t
  misc_feature (679)..(680): n is a, c, g, or t
  misc_feature (687)..(688): n is a, c, g, or t
  misc_feature (691)..(691): n is a, c, g, or t
  misc_feature (694)..(694): n is a, c, g, or t
  misc_feature (696)..(697): n is a, c, g, or t
  misc_feature (700)..(700): n is a, c, g, or t
  misc_feature (702)..(702): n is a, c, g, or t
  misc_feature (704)..(704): n is a, c, g, or t
  misc_feature (707)..(707): n is a, c, g, or t
  misc_feature (709)..(709): n is a, c, g, or t
  misc_feature (714)..(714): n is a, c, g, or t
  misc_feature (718)..(718): n is a, c, g, or t
  misc_feature (720)..(721): n is a, c, g, or t
  misc_feature (724)..(724): n is a, c, g, or t
  misc_feature (726)..(726): n is a, c, g, or t
  misc_feature (728)..(729): n is a, c, g, or t
  misc_feature (735)..(735): n is a, c, g, or t
  misc_feature (738)..(739): n is a, c, g, or t
  misc_feature (748)..(750): n is a, c, g, or t
  misc_feature (753)..(753): n is a, c, g, or t
  misc_feature (756)..(757): n is a, c, g, or t
  misc_feature (760)..(760): n is a, c, g, or t
  misc_feature (762)..(762): n is a, c, g, or t
  misc_feature (766)..(766): n is a, c, g, or t
  misc_feature (773)..(773): n is a, c, g, or t
  misc_feature (777)..(778): n is a, c, g, or t
  misc_feature (780)..(780): n is a, c, g, or t
  misc_feature (786)..(786): n is a, c, g, or t
  misc_feature (789)..(793): n is a, c, g, or t
  misc_feature (799)..(802): n is a, c, g, or t
  misc_feature (807)..(808): n is a, c, g, or t
  misc_feature (810)..(810): n is a, c, g, or t
  misc_feature (813)..(814): n is a, c, g, or t
  misc_feature (817)..(819): n is a, c, g, or t
  misc_feature (821)..(821): n is a, c, g, or t
  misc_feature (825)..(826): n is a, c, g, or t
  misc_feature (829)..(829): n is a, c, g, or t
  misc_feature (833)..(834): n is a, c, g, or t
  misc_feature (836)..(837): n is a, c, g, or t
  misc_feature (841)..(842): n is a, c, g, or t
  misc_feature (845)..(845): n is a, c, g, or t
  misc_feature (847)..(847): n is a, c, g, or t
  misc_feature (851)..(851): n is a, c, g, or t
  misc_feature (853)..(857): n is a, c, g, or t
  misc_feature (867)..(867): n is a, c, g, or t
  misc_feature (870)..(871): n is a, c, g, or t
  misc_feature (873)..(874): n is a, c, g, or t
  misc_feature (883)..(883): n is a, c, g, or t
  misc_feature (886)..(888): n is a, c, g, or t
  misc_feature (891)..(892): n is a, c, g, or t
  misc_feature (894)..(895): n is a, c, g, or t
  misc_feature (897)..(898): n is a, c, g, or t
  misc_feature (903)..(903): n is a, c, g, or t
  misc_feature (910)..(910): n is a, c, g, or t
  misc_feature (916)..(916): n is a, c, g, or t
  misc_feature (919)..(919): n is a, c, g, or t
  misc_feature (924)..(925): n is a, c, g, or t
  misc_feature (927)..(927): n is a, c, g, or t
  misc_feature (929)..(929): n is a, c, g, or t
  misc_feature (931)..(931): n is a, c, g, or t
  misc_feature (939)..(940): n is a, c, g, or t
  misc_feature (944)..(944): n is a, c, g, or t
  misc_feature (947)..(948): n is a, c, g, or t
  misc_feature (950)..(953): n is a, c, g, or t
  misc_feature (955)..(956): n is a, c, g, or t
  misc_feature (959)..(959): n is a, c, g, or t
  misc_feature (961)..(963): n is a, c, g, or t
  misc_feature (966)..(966): n is a, c, g, or t
  misc_feature (968)..(968): n is a, c, g, or t
  misc_feature (970)..(970): n is a, c, g, or t
  misc_feature (978)..(978): n is a, c, g, or t
  misc_feature (980)..(980): n is a, c, g, or t
  misc_feature (983)..(983): n is a, c, g, or t
  misc_feature (986)..(987): n is a, c, g, or t
  misc_feature (990)..(994): n is a, c, g, or t
  misc_feature (996)..(996): n is a, c, g, or t
  misc_feature (1001)..(1001): n is a, c, g, or t
  misc_feature (1012)..(1012): n is a, c, g, or t
  misc_feature (1019)..(1019): n is a, c, g, or t
  misc_feature (1024)..(1026): n is a, c, g, or t
  misc_feature (1030)..(1031): n is a, c, g, or t
  misc_feature (1033)..(1033): n is a, c, g, or t
  misc_feature (1036)..(1036): n is a, c, g, or t
  misc_feature (1038)..(1039): n is a, c, g, or t
  misc_feature (1041)..(1041): n is a, c, g, or t
  misc_feature (1046)..(1047): n is a, c, g, or t
  misc_feature (1053)..(1053): n is a, c, g, or t
  misc_feature (1055)..(1055): n is a, c, g, or t
  misc_feature (1060)..(1060): n is a, c, g, or t
  misc_feature (1063)..(1064): n is a, c, g, or t
  misc_feature (1066)..(1067): n is a, c, g, or t
  misc_feature (1070)..(1071): n is a, c, g, or t
  misc_feature (1073)..(1073): n is a, c, g, or t
  misc_feature (1079)..(1079): n is a, c, g, or t
  misc_feature (1082)..(1082): n is a, c, g, or t
  misc_feature (1086)..(1087): n is a, c, g, or t
  misc_feature (1091)..(1091): n is a, c, g, or t
  misc_feature (1097)..(1097): n is a, c, g, or t
  misc_feature (1101)..(1101): n is a, c, g, or t
  misc_feature (1104)..(1109): n is a, c, g, or t
  misc_feature (1112)..(1112): n is a, c, g, or t
  misc_feature (1114)..(1116): n is a, c, g, or t
  misc_feature (1119)..(1123): n is a, c, g, or t
  misc_feature (1126)..(1126): n is a, c, g, or t
  misc_feature (1129)..(1129): n is a, c, g, or t
  misc_feature (1132)..(1133): n is a, c, g, or t
  misc_feature (1144)..(1145): n is a, c, g, or t
  misc_feature (1148)..(1153): n is a, c, g, or t
  misc_feature (1156)..(1156): n is a, c, g, or t
  misc_feature (1159)..(1159): n is a, c, g, or t
  misc_feature (1166)..(1166): n is a, c, g, or t
  misc_feature (1169)..(1170): n is a, c, g, or t
  misc_feature (1174)..(1174): n is a, c, g, or t
  misc_feature (1177)..(1177): n is a, c, g, or t
  misc_feature (1182)..(1184): n is a, c, g, or t
  misc_feature (1189)..(1189): n is a, c, g, or t
  misc_feature (1203)..(1203): n is a, c, g, or t
  misc_feature (1205)..(1209): n is a, c, g, or t
  misc_feature (1211)..(1216): n is a, c, g, or t
  misc_feature (1226)..(1226): n is a, c, g, or t
  misc_feature (1231)..(1232): n is a, c, g, or t
  misc_feature (1234)..(1234): n is a, c, g, or t
  misc_feature (1237)..(1237): n is a, c, g, or t
  misc_feature (1241)..(1242): n is a, c, g, or t
  misc_feature (1245)..(1246): n is a, c, g, or t
  misc_feature (1250)..(1251): n is a, c, g, or t
  misc_feature (1254)..(1254): n is a, c, g, or t
  misc_feature (1257)..(1257): n is a, c, g, or t
  misc_feature (1259)..(1260): n is a, c, g, or t
  misc_feature (1264)..(1264): n is a, c, g, or t
  misc_feature (1268)..(1268): n is a, c, g, or t
  misc_feature (1270)..(1270): n is a, c, g, or t
  misc_feature (1274)..(1274): n is a, c, g, or t
  misc_feature (1276)..(1276): n is a, c, g, or t
  misc_feature (1281)..(1282): n is a, c, g, or t
  misc_feature (1289)..(1289): n is a, c, g, or t
  misc_feature (1291)..(1291): n is a, c, g, or t
  misc_feature (1295)..(1295): n is a, c, g, or t
  misc_feature (1299)..(1299): n is a, c, g, or t
  misc_feature (1301)..(1301): n is a, c, g, or t
  misc_feature (1303)..(1305): n is a, c, g, or t
  misc_feature (1309)..(1309): n is a, c, g, or t
  misc_feature (1312)..(1312): n is a, c, g, or t
  misc_feature (1316)..(1317): n is a, c, g, or t
  misc_feature (1319)..(1319): n is a, c, g, or t
  misc_feature (1325)..(1326): n is a, c, g, or t
  misc_feature (1331)..(1331): n is a, c, g, or t
  misc_feature (1335)..(1335): n is a, c, g, or t
  misc_feature (1338)..(1338): n is a, c, g, or t
  misc_feature (1348)..(1349): n is a, c, g, or t
  misc_feature (1351)..(1351): n is a, c, g, or t
  misc_feature (1356)..(1358): n is a, c, g, or t
  misc_feature (1362)..(1363): n is a, c, g, or t
  misc_feature (1366)..(1366): n is a, c, g, or t
  misc_feature (1376)..(1376): n is a, c, g, or t
  misc_feature (1379)..(1380): n is a, c, g, or t
  misc_feature (1385)..(1385): n is a, c, g, or t
  misc_feature (1387)..(1387): n is a, c, g, or t
  misc_feature (1392)..(1392): n is a, c, g, or t
  misc_feature (1400)..(1400): n is a, c, g, or t
  misc_feature (1402)..(1402): n is a, c, g, or t
  misc_feature (1409)..(1411): n is a, c, g, or t
  misc_feature (1418)..(1419): n is a, c, g, or t
  misc_feature (1422)..(1422): n is a, c, g, or t
  misc_feature (1426)..(1426): n is a, c, g, or t
  misc_feature (1440)..(1440): n is a, c, g, or t
  misc_feature (1444)..(1444): n is a, c, g, or t
  misc_feature (1450)..(1451): n is a, c, g, or t
  misc_feature (1455)..(1455): n is a, c, g, or t
  misc_feature (1459)..(1460): n is a, c, g, or t
  misc_feature (1462)..(1462): n is a, c, g, or t
  misc_feature (1466)..(1466): n is a, c, g, or t
  misc_feature (1469)..(1469): n is a, c, g, or t
  misc_feature (1473)..(1474): n is a, c, g, or t
  misc_feature (1476)..(1476): n is a, c, g, or t
  misc_feature (1483)..(1483): n is a, c, g, or t
  misc_feature (1487)..(1487): n is a, c, g, or t
  misc_feature (1490)..(1492): n is a, c, g, or t
  misc_feature (1497)..(1497): n is a, c, g, or t
  misc_feature (1500)..(1500): n is a, c, g, or t
  misc_feature (1508)..(1509): n is a, c, g, or t
  misc_feature (1513)..(1513): n is a, c, g, or t
  misc_feature (1528)..(1528): n is a, c, g, or t
  misc_feature (1531)..(1531): n is a, c, g, or t
  misc_feature (1537)..(1537): n is a, c, g, or t
  misc_feature (1540)..(1540): n is a, c, g, or t
  misc_feature (1542)..(1542): n is a, c, g, or t
  misc_feature (1547)..(1548): n is a, c, g, or t
  misc_feature (1555)..(1555): n is a, c, g, or t
  misc_feature (1560)..(1560): n is a, c, g, or t
  misc_feature (1563)..(1563): n is a, c, g, or t
  misc_feature (1568)..(1569): n is a, c, g, or t
  misc_feature (1572)..(1572): n is a, c, g, or t
  misc_feature (1576)..(1576): n is a, c, g, or t
  misc_feature (1586)..(1589): n is a, c, g, or t
  misc_feature (1596)..(1596): n is a, c, g, or t
  misc_feature (1598)..(1599): n is a, c, g, or t
  misc_feature (1602)..(1604): n is a, c, g, or t
nnannnaananangganntnttttgggnggnggggttnncanccccnttcancnggnnggnantntntttgtgnggnggatactnnnaatccatncacacccaaccccntcgtncnnggttgngcnggnagcgctgggcaananncatcnnangagtcncnncgtcaaatgaaacngantgccgnccnnccngcgggntngtgngnaannaacttacgcncccaaagccncngnttnctgnanntgcgnnanggccangncnngananntgagtcnttntgggatnaantcttgnacatgtagnanctatgtggcccagactgactagagantggntattcctcncggnacgntggnacaagnctatncngatcctggcnntngggntcangcntgtnntccacggnanttnactangngcttggngngttncaccanaaaccagaaaatgnanaccgnccnggaacacnatgtnnangccccntcnctccaacangngcggnnnttannncaagcatggttcnngcngcccgttnanntctnaccnnctcnggancctgannngagnggatggntnaaccccggnaggcaaagncntngnngcaatttaaaatnnncnccagtgnactcctnagggngagaantngnnaagacctccgncgccaaanncannnatnanntctgggnnttntgnanngtntntntcntncctcnctgngnncgntnannaaggcngannggaataaannncanatnnaantntttngtaaggncttnnanaaaagngannnnngtcaannnnggggnncnggnnttnnnanctannaangacnncnngggnnctngnaaangnnnnnttttgtaganaanntnnctcattttnggnnnttnntnncnntgaanggagaanataaantancgttnncncngnttatctanntagntgnngnnnntnnttntnnntcnangnccctgtgntnaantgnnttnnnnngnacatnttcatcatagncccgtcncaccnnncctnnanatnanngntctcnncatcgntntttanctnncnnaanntncgtggnctncatnnttantatatntaancannnnnnaanannnacnnnnncanttnttnntaatcattgtnntannnnnnagnatngaaaaanatnntttnccnttcannnaaacncttcggttcgtaancnnnnnannnnnntttaccactnatcgnncnaanacanntcnntttnnatntcngnntctncatnantagnancttgnntcctatncngctnagananannnatantcngtanntngtcacnnatatnatantcncaatacttgnncncctcnnnagtnnttntaaataactngtnncaacntnattcnacatatanantaaacannnctgtatnnacncttntaatattcttctanacgnctattnnatcntacnncncttnaanacgnntnatcgatncganaannnctgcncanctgtctcnnatanaacatctatgtgaantcnattatnttncncctcnnagacttngacanaantgagnngantatnaacatcatannnncacacgnanntcnnn

SEQ ID NO: 934 - DNA, 1133 bp, Homo Sapiens
  misc_feature (2)..(3): n is a, c, g, or t
  misc_feature (661)..(661): n is a, c, g, or t
  misc_feature (679)..(679): n is a, c, g, or t
  misc_feature (742)..(742): n is a, c, g, or t
  misc_feature (750)..(750): n is a, c, g, or t
  misc_feature (765)..(765): n is a, c, g, or t
  misc_feature (768)..(768): n is a, c, g, or t
  misc_feature (770)..(770): n is a, c, g, or t
  misc_feature (784)..(784): n is a, c, g, or t
  misc_feature (786)..(786): n is a, c, g, or t
  misc_feature (792)..(792): n is a, c, g, or t
  misc_feature (794)..(794): n is a, c, g, or t
  misc_feature (799)..(799): n is a, c, g, or t
  misc_feature (801)..(801): n is a, c, g, or t
  misc_feature (803)..(803): n is a, c, g, or t
  misc_feature (808)..(808): n is a, c, g, or t
  misc_feature (838)..(838): n is a, c, g, or t
  misc_feature (841)..(841): n is a, c, g, or t
  misc_feature (843)..(843): n is a, c, g, or t
  misc_feature (845)..(845): n is a, c, g, or t
  misc_feature (852)..(854): n is a, c, g, or t
  misc_feature (859)..(860): n is a, c, g, or t
  misc_feature (872)..(872): n is a, c, g, or t
  misc_feature (877)..(877): n is a, c, g, or t
  misc_feature (893)..(893): n is a, c, g, or t
  misc_feature (895)..(896): n is a, c, g, or t
  misc_feature (898)..(898): n is a, c, g, or t
  misc_feature (901)..(901): n is a, c, g, or t
  misc_feature (903)..(904): n is a, c, g, or t
  misc_feature (907)..(907): n is a, c, g, or t
  misc_feature (910)..(912): n is a, c, g, or t
  misc_feature (915)..(915): n is a, c, g, or t
  misc_feature (918)..(918): n is a, c, g, or t
  misc_feature (920)..(920): n is a, c, g, or t
  misc_feature (925)..(925): n is a, c, g, or t
  misc_feature (928)..(928): n is a, c, g, or t
  misc_feature (935)..(935): n is a, c, g, or t
  misc_feature (938)..(939): n is a, c, g, or t
  misc_feature (941)..(941): n is a, c, g, or t
  misc_feature (944)..(945): n is a, c, g, or t
  misc_feature (948)..(948): n is a, c, g, or t
  misc_feature (950)..(950): n is a, c, g, or t
  misc_feature (958)..(960): n is a, c, g, or t
  misc_feature (965)..(965): n is a, c, g, or t
  misc_feature (969)..(969): n is a, c, g, or t
  misc_feature (972)..(973): n is a, c, g, or t
  misc_feature (978)..(978): n is a, c, g, or t
  misc_feature (985)..(985): n is a, c, g, or t
  misc_feature (987)..(987): n is a, c, g, or t
  misc_feature (993)..(993): n is a, c, g, or t
  misc_feature (996)..(997): n is a, c, g, or t
  misc_feature (1001)..(1001): n is a, c, g, or t
  misc_feature (1003)..(1003): n is a, c, g, or t
  misc_feature (1011)..(1011): n is a, c, g, or t
  misc_feature (1014)..(1015): n is a, c, g, or t
  misc_feature (1017)..(1017): n is a, c, g, or t
  misc_feature (1024)..(1025): n is a, c, g, or t
  misc_feature (1027)..(1029): n is a, c, g, or t
  misc_feature (1035)..(1035): n is a, c, g, or t
  misc_feature (1039)..(1040): n is a, c, g, or t
  misc_feature (1043)..(1044): n is a, c, g, or t
  misc_feature (1051)..(1051): n is a, c, g, or t
  misc_feature (1056)..(1056): n is a, c, g, or t
  misc_feature (1061)..(1062): n is a, c, g, or t
  misc_feature (1064)..(1064): n is a, c, g, or t
  misc_feature (1066)..(1066): n is a, c, g, or t
  misc_feature (1071)..(1076): n is a, c, g, or t
  misc_feature (1078)..(1078): n is a, c, g, or t
  misc_feature (1081)..(1081): n is a, c, g, or t
  misc_feature (1084)..(1084): n is a, c, g, or t
  misc_feature (1086)..(1096): n is a, c, g, or t
  misc_feature (1099)..(1105): n is a, c, g, or t
  misc_feature (1107)..(1107): n is a, c, g, or t
  misc_feature (1110)..(1110): n is a, c, g, or t
  misc_feature (1114)..(1119): n is a, c, g, or t
  misc_feature (1121)..(1124): n is a, c, g, or t
  misc_feature (1126)..(1127): n is a, c, g, or t
  misc_feature (1130)..(1133): n is a, c, g, or t
anntagagaaattaactatgagaggatcgcatcaccatcaccatcacggatcctatttaggtgacactatagaatcgtcgacccacgcgtccgactggcacaagcaccaggtcaaagggcatggaggggacgacggagcggccagagccccgggcagcacgtgggccatagcgcgtggctacctgcacaaggagttcctcatggtgctccaccatgccgccatggtgctggtgtgcttcccactctcagtggtgtggcgacaggggaagggagacttctttctgggttgcatgttgatggcagaggtcagcacgcccttcgtctgccttggcaagatcctcatccagtacaagcagcagcacacactgctgcacaaggtgaacggggccctgatgctgctcagcttcctctgctgccgggtgctgctctttccctacctgtactgggcctacgggcgccatgccggcctgcccctgctggccgtgcccctggccatccctgcccacgtcaacctgggcgctgcgctgctcctggcccctcagctctactggttcttcctcatctgccgtggggcctgccgcctcttctggccccgctcccggccgcccccggcctgccaggcccaggactgaggccgggggccgggaccctccccctcccnacacccacccccgtgganacagggctctggggctgatggctggggttgggagccagggtcctcttgcccggacaaccccangactgacnatgaccccgaaaggnaanangccccatctctcgngnactgangnggtgnananagggnaactcttccccctactctgcccccctttcntgnanancctttgnnntggannaagggaaggggncaccncctcccacccactgangnnanaangnnttntgnnnaanganancaaanggntttcaanggnnancannaantnaaatgtgnnnaaaancctnttnnaaagncattccnancccctnatnnttgncnttccccanggnntncccattnncnnnaaaagnaaannaannccccaanataanccccnntngnccttnnnnnntnccnaantnnnnnnnnnnnaannnnnnntnccnttcnnnnnnannnnannttnnnn

SEQ ID NO: 935 - DNA, 1387 bp, Homo Sapiens
  misc_feature (945)..(945): n is a, c, g, or t
  misc_feature (984)..(984): n is a, c, g, or t
  misc_feature (1000)..(1000): n is a, c, g, or t
  misc_feature (1008)..(1008): n is a, c, g, or t
  misc_feature (1016)..(1016): n is a, c, g, or t
  misc_feature (1024)..(1024): n is a, c, g, or t
  misc_feature (1039)..(1039): n is a, c, g, or t
  misc_feature (1050)..(1050): n is a, c, g, or t
  misc_feature (1054)..(1054): n is a, c, g, or t
  misc_feature (1058)..(1058): n is a, c, g, or t
  misc_feature (1061)..(1061): n is a, c, g, or t
  misc_feature (1063)..(1063): n is a, c, g, or t
  misc_feature (1081)..(1081): n is a, c, g, or t
  misc_feature (1086)..(1086): n is a, c, g, or t
  misc_feature (1096)..(1096): n is a, c, g, or t
  misc_feature (1101)..(1102): n is a, c, g, or t
  misc_feature (1116)..(1116): n is a, c, g, or t
  misc_feature (1124)..(1124): n is a, c, g, or t
  misc_feature (1141)..(1141): n is a, c, g, or t
  misc_feature (1145)..(1145): n is a, c, g, or t
  misc_feature (1148)..(1149): n is a, c, g, or t
  misc_feature (1153)..(1153): n is a, c, g, or t
  misc_feature (1155)..(1155): n is a, c, g, or t
  misc_feature (1167)..(1167): n is a, c, g, or t
  misc_feature (1171)..(1171): n is a, c, g, or t
  misc_feature (1175)..(1175): n is a, c, g, or t
  misc_feature (1180)..(1180): n is a, c, g, or t
  misc_feature (1182)..(1182): n is a, c, g, or t
  misc_feature (1200)..(1200): n is a, c, g, or t
  misc_feature (1205)..(1205): n is a, c, g, or t
  misc_feature (1207)..(1207): n is a, c, g, or t
  misc_feature (1209)..(1209): n is a, c, g, or t
  misc_feature (1220)..(1220): n is a, c, g, or t
  misc_feature (1226)..(1226): n is a, c, g, or t
  misc_feature (1231)..(1231): n is a, c, g, or t
  misc_feature (1234)..(1236): n is a, c, g, or t
  misc_feature (1247)..(1247): n is a, c, g, or t
  misc_feature (1256)..(1257): n is a, c, g, or t
  misc_feature (1259)..(1259): n is a, c, g, or t
  misc_feature (1262)..(1262): n is a, c, g, or t
  misc_feature (1266)..(1266): n is a, c, g, or t
  misc_feature (1270)..(1270): n is a, c, g, or t
  misc_feature (1283)..(1283): n is a, c, g, or t
  misc_feature (1285)..(1325): n is a, c, g, or t
  misc_feature (1330)..(1330): n is a, c, g, or t
  misc_feature (1333)..(1333): n is a, c, g, or t
  misc_feature (1338)..(1338): n is a, c, g, or t
  misc_feature (1340)..(1343): n is a, c, g, or t
  misc_feature (1351)..(1351): n is a, c, g, or t
  misc_feature (1354)..(1354): n is a, c, g, or t
  misc_feature (1357)..(1362): n is a, c, g, or t
  misc_feature (1370)..(1371): n is a, c, g, or t
  misc_feature (1375)..(1377): n is a, c, g, or t
  misc_feature (1380)..(1381): n is a, c, g, or t
  misc_feature (1387)..(1387): n is a, c, g, or t
agagagattactatgagaggatcgcatcaccatcaccatcacggatcctatttaggtgacactatagaatcgtcgacccacgcgtccggcgctgcagccatgcagcccccgcccccgggcccgctgggcgactgcctgcgggactgggaggatctacagcaggacttccagaacatccaggagacccatcggctctaccgcctgaagctggaggagctgaccaaacttcagaacaattgcaccagctccatcacgcggcagaagaagcggctccaggagctggccctcgccctgaagaaatgcaaaccctccctcccagcagaggccgagggggccgcacaggagctggagaaccagatgaaagagcgccaaggcctcttctttgacatggaggcctatttgcctaagaagaatggattgtacctgagcctggttctggggaacgtcaacgtcacgctcctgagcaagcaggctaagtttgcctacaaggacgagtatgagaagttcaagctctacctcaccatcatcctcatcctcatctccttcacttgccgcttcctgctcaactccagggtgacagatgctgccttcaacttcctgctggtctggtactactgcaccctgaccatccgggagagcatcctcatcaacaacggctcccggatcaaaggctggtgggtgttccatcactacgtgtccaccttcctgtcgggagtcatgctgacgtggcccgacggtctcatgtaccagaaattccggaaccaattcctctccttttccatgtaccagagcttcgtgcagtttctccagtactactaccagagcggctgcctctaccgcctgcgggcgctgggcgagcggcacaccatggacctcactgtggagggcttccagtcctggatgtggcggggcctcaccttcctgctgccttttcttttcttgganacttctggcagctttttaacgcgctgacgttgttcaacntggcccagaacctcantgcaagantggcaggngcttatgngcggctttccttccncctcctttccncggnattnttncnccaccctgaggttgggcnccaantttcaaatcncggcnnggaacaaaaagatngaggtggncttccctgcggcccaangggnttnntctntnttttggaaaggnatgnaagnccccncnagggggggttaagggggnctttntntncccttggtttnagggcnggggnccnnnaaaaaactggnccccgcccnntnaangggncccnaaaaaaaaaaaanannnnnnnnnnnnnnnnnnnnnnnnnnnnnnnnnnnnnnnnnaaaanggnccccnannnnaaaaaaanaanggnnnnnnaaaaaaannaccnnnttnngggggn

SEQ ID NO: 936 - DNA, 1444 bp, Homo Sapiens
  misc_feature (9)..(9): n is a, c, g, or t
  misc_feature (15)..(15): n is a, c, g, or t
  misc_feature (852)..(852): n is a, c, g, or t
  misc_feature (926)..(926): n is a, c, g, or t
  misc_feature (941)..(941): n is a, c, g, or t
  misc_feature (973)..(973): n is a, c, g, or t
  misc_feature (978)..(978): n is a, c, g, or t
  misc_feature (985)..(985): n is a, c, g, or t
  misc_feature (988)..(988): n is a, c, g, or t
  misc_feature (997)..(997): n is a, c, g, or t
  misc_feature (999)..(1000): n is a, c, g, or t
  misc_feature (1007)..(1007): n is a, c, g, or t
  misc_feature (1012)..(1012): n is a, c, g, or t
  misc_feature (1027)..(1027): n is a, c, g, or t
  misc_feature (1032)..(1032): n is a, c, g, or t
  misc_feature (1039)..(1040): n is a, c, g, or t
  misc_feature (1047)..(1047): n is a, c, g, or t
  misc_feature (1067)..(1067): n is a, c, g, or t
  misc_feature (1072)..(1073): n is a, c, g, or t
  misc_feature (1075)..(1075): n is a, c, g, or t
  misc_feature (1096)..(1097): n is a, c, g, or t
  misc_feature (1102)..(1102): n is a, c, g, or t
  misc_feature (1105)..(1105): n is a, c, g, or t
  misc_feature (1109)..(1109): n is a, c, g, or t
  misc_feature (1127)..(1127): n is a, c, g, or t
  misc_feature (1131)..(1131): n is a, c, g, or t
  misc_feature (1136)..(1136): n is a, c, g, or t
  misc_feature (1141)..(1141): n is a, c, g, or t
  misc_feature (1148)..(1149): n is a, c, g, or t
  misc_feature (1157)..(1157): n is a, c, g, or t
  misc_feature (1160)..(1160): n is a, c, g, or t
  misc_feature (1162)..(1163): n is a, c, g, or t
  misc_feature (1167)..(1167): n is a, c, g, or t
  misc_feature (1176)..(1176): n is a, c, g, or t
  misc_feature (1198)..(1198): n is a, c, g, or t
  misc_feature (1200)..(1200): n is a, c, g, or t
  misc_feature (1208)..(1209): n is a, c, g, or t
  misc_feature (1213)..(1214): n is a, c, g, or t
  misc_feature (1220)..(1220): n is a, c, g, or t
  misc_feature (1225)..(1225): n is a, c, g, or t
  misc_feature (1235)..(1235): n is a, c, g, or t
  misc_feature (1241)..(1241): n is a, c, g, or t
  misc_feature (1263)..(1263): n is a, c, g, or t
  misc_feature (1266)..(1266): n is a, c, g, or t
  misc_feature (1276)..(1276): n is a, c, g, or t
  misc_feature (1291)..(1292): n is a, c, g, or t
  misc_feature (1296)..(1296): n is a, c, g, or t
  misc_feature (1306)..(1306): n is a, c, g, or t
  misc_feature (1324)..(1324): n is a, c, g, or t
  misc_feature (1328)..(1328): n is a, c, g, or t
  misc_feature (1332)..(1332): n is a, c, g, or t
  misc_feature (1345)..(1345): n is a, c, g, or t
  misc_feature (1369)..(1369): n is a, c, g, or t
  misc_feature (1371)..(1371): n is a, c, g, or t
  misc_feature (1374)..(1376): n is a, c, g, or t
  misc_feature (1378)..(1379): n is a, c, g, or t
  misc_feature (1385)..(1385): n is a, c, g, or t
  misc_feature (1398)..(1398): n is a, c, g, or t
  misc_feature (1406)..(1407): n is a, c, g, or t
  misc_feature (1412)..(1412): n is a, c, g, or t
  misc_feature (1414)..(1414): n is a, c, g, or t
  misc_feature (1420)..(1420): n is a, c, g, or t
gaatagagnaattanctatggagaggatcgcatcaccatcaccatcacggatcctatttaggtgacactatagaatcgtcgacccacgcgtccgacagaaaccaaggacaacaagatacaaatacctttaaattgataaaatgttttcactgtaatataaattatgagtgcgggaccactattcaatttttttttgtaaagaatgtatttataaccaacattttgttgcttttttttttaattctgtaggattgaacttcaataccaggaagttatgccaacttttcaagtagttttataatagaaaaattgtaatagttttaatcaagatgttcaggggtattaaaacagaactgtgtactgtatatctgtatatatgtatatatgtatgtatatttaaggaagtccagaaatcatactgcatacatgctacaaaaaagtagcaaaaaagtacaaagttggcttagataacttgtaccattttaaatggagatcataattttatgttcacttgatggggaatgactagaatggggcaataacaaatcatttctaaacagttattttccattaaaagccatattaagtattttgcttgttaaattctagttttatgttttaaatctcttagtggttacattgccatttggtagcatcatgtatatatttatgcttataagtttgcattatgactcctgtaaaatatgaaattataatgcaataaaagtgttatctttcttacaaaagttttgtacctaagtggatatagataactgcataaatgaataaaattcagaattacctccttcaatatttctagtagcacaactgataatattgatattttctacnaaatgttacctcctaaaattacagacaaaatttaccttacacaattcagttaagaaggcctttgacactgaaanaaaatattgatttcntgaaaaaaaaaaaaaaaaaaaaaaaggggcgnccccnccccaanagnggagtccgnannaagcctnaaatnacctgaccctggganccccnggttgannaaatccnggtaagggaccccccaaacnccccnncnggaatttgttccaaaaccccnnggtgnccncccnggcggttttttttggggnaaancccanccacnctggccnnaatttccnggncnnaggnaccctaaangggaaaaaaaaaccccgggaanancccccgtnnaaannccccanggccncccaaaaaanttttgnggcatttccccccggggcccanggnccctaacccnaccctccccgggaannacgncctttaaaanccaaaaaaaaaaccccantttncccncccttttcccccnccccccccggaaggcccccccaantnccnnngnnaaaaanccggcgccggganagaaaagnnccccntntacccnttccgaaaaaaaaaatttcccccg

SEQ ID NO: 937 - DNA, 1412 bp, Homo Sapiens
  misc_feature (911)..(911): n is a, c, g, or t
  misc_feature (928)..(928): n is a, c, g, or t
  misc_feature (953)..(953): n is a, c, g, or t
  misc_feature (992)..(992): n is a, c, g, or t
  misc_feature (1014)..(1014): n is a, c, g, or t
  misc_feature (1018)..(1018): n is a, c, g, or t
  misc_feature (1022)..(1022): n is a, c, g, or t
  misc_feature (1028)..(1028): n is a, c, g, or t
  misc_feature (1030)..(1031): n is a, c, g, or t
  misc_feature (1039)..(1050): n is a, c, g, or t
  misc_feature (1052)..(1090): n is a, c, g, or t
  misc_feature (1092)..(1123): n is a, c, g, or t
  misc_feature (1131)..(1131): n is a, c, g, or t
  misc_feature (1141)..(1141): n is a, c, g, or t
  misc_feature (1150)..(1150): n is a, c, g, or t
  misc_feature (1157)..(1157): n is a, c, g, or t
  misc_feature (1159)..(1159): n is a, c, g, or t
  misc_feature (1162)..(1162): n is a, c, g, or t
  misc_feature (1166)..(1166): n is a, c, g, or t
  misc_feature (1169)..(1170): n is a, c, g, or t
  misc_feature (1181)..(1181): n is a, c, g, or t
  misc_feature (1195)..(1196): n is a, c, g, or t
  misc_feature (1205)..(1205): n is a, c, g, or t
  misc_feature (1214)..(1214): n is a, c, g, or t
  misc_feature (1230)..(1230): n is a, c, g, or t
  misc_feature (1232)..(1232): n is a, c, g, or t
  misc_feature (1251)..(1251): n is a, c, g, or t
  misc_feature (1254)..(1254): n is a, c, g, or t
  misc_feature (1258)..(1259): n is a, c, g, or t
  misc_feature (1267)..(1267): n is a, c, g, or t
  misc_feature (1271)..(1271): n is a, c, g, or t
  misc_feature (1279)..(1279): n is a, c, g, or t
  misc_feature (1285)..(1285): n is a, c, g, or t
  misc_feature (1288)..(1289): n is a, c, g, or t
  misc_feature (1291)..(1291): n is a, c, g, or t
  misc_feature (1294)..(1294): n is a, c, g, or t
  misc_feature (1297)..(1297): n is a, c, g, or t
  misc_feature (1302)..(1302): n is a, c, g, or t
  misc_feature (1310)..(1310): n is a, c, g, or t
  misc_feature (1316)..(1316): n is a, c, g, or t
  misc_feature (1327)..(1327): n is a, c, g, or t
  misc_feature (1346)..(1348): n is a, c, g, or t
  misc_feature (1350)..(1354): n is a, c, g, or t
  misc_feature (1356)..(1357): n is a, c, g, or t
  misc_feature (1364)..(1365): n is a, c, g, or t
  misc_feature (1367)..(1367): n is a, c, g, or t
  misc_feature (1370)..(1370): n is a, c, g, or t
  misc_feature (1372)..(1372): n is a, c, g, or t
  misc_feature (1375)..(1376): n is a, c, g, or t
  misc_feature (1381)..(1381): n is a, c, g, or t
  misc_feature (1398)..(1398): n is a, c, g, or t
  misc_feature (1408)..(1409): n is a, c, g, or t
gaatagagaaattactatgagaggatcgcatcaccatcaccatcacggatcctatttaggtgacactatagaatcgtcgacccacgcgtccgccaaagaagattctaaacttatagctctcatatggcccagtgagtggcaaatgatacaaaagctctttgttgtggatcatgtaattaaaatcacgagaattgaagtgggagatgtaaacccttcagaaacacagtatatttctgagcccaaactctgtccagaatgcagagaaggcttattgtgtcagcagcagagggacctgcgtgaatacactcaagccaccatctatgtccataaagttgtggataataaaaaggtgatgaaggattcggctccggaactgaatgtgagtagttctgaaacagaggaggacaaggaagaagctaaaccagatggagaaaaagatccagattttaatcaaagcaatggtggaacaaagcggcaaaagatatcccatcaaaattatatagcctatcaaaagcaagttattcgccgaagtatgcgacatagaaaagttcgtggtgagaaagcacttctcgtttctgctaatcagacgttaaaagaattgaaaattcagatcatgcatgcattttcagttgctccttttgaccagaatttgtcaattgatggaaagattttaagtgatgactgtgccaccctaggcacccttggcgtcattcctgaatctgtcattttattgaaggctgatgaaccaattgcagattatgctgcaatggatgatgtcatgcaagtttgtatgccagaagaagggtttaaaggtactggtcttcttggacattaatctttgaatacttgctgactgctaagaaatgaccagaggggaagaggagtttgacatgttagggcattaaagcaanggtggatttaagaattnaaccattacatgcccccttccaaanggcagaaatccattcaacgtgactgtcccaaatgccttntgtcaaataaaagcaaatggcnctgntggncctccnannaaaaaaannnnnnnnnnnnannnnnnnnnnnnnnnnnnnnnnnnnnnnnnnnnnnnnnnannnnnnnnnnnnnnnnnnnnnnnnnnnnnnnngggggggncccccccccnaaggggggncaaaaancnttnttancgnncttgggccccngggaaaaacccccnnaggcccccnacccccccngttttttcaaaccccntntgccccggggttttttttnggnaaanncccccccntggngaattttngggccnggnncnaanggnaaaanccggggancccccnaaaccccgggncccaaaaatttggggtttnnntnnnnngnnaaaaacnncnctngnatnnctttnacccaaaaaaccctttncccttttccnnccc

SEQ ID NO: 938 - DNA, 1397 bp, Homo Sapiens
  misc_feature (750)..(750): n is a, c, g, or t
  misc_feature (895)..(895): n is a, c, g, or t
  misc_feature (929)..(929): n is a, c, g, or t
  misc_feature (937)..(937): n is a, c, g, or t
  misc_feature (940)..(940): n is a, c, g, or t
  misc_feature (948)..(948): n is a, c, g, or t
  misc_feature (956)..(956): n is a, c, g, or t
  misc_feature (964)..(964): n is a, c, g, or t
  misc_feature (972)..(972): n is a, c, g, or t
  misc_feature (983)..(983): n is a, c, g, or t
  misc_feature (1013)..(1013): n is a, c, g, or t
  misc_feature (1018)..(1018): n is a, c, g, or t
  misc_feature (1038)..(1038): n is a, c, g, or t
  misc_feature (1041)..(1041): n is a, c, g, or t
  misc_feature (1055)..(1055): n is a, c, g, or t
  misc_feature (1061)..(1061): n is a, c, g, or t
  misc_feature (1067)..(1067): n is a, c, g, or t
  misc_feature (1073)..(1073): n is a, c, g, or t
  misc_feature (1081)..(1081): n is a, c, g, or t
  misc_feature (1086)..(1086): n is a, c, g, or t
  misc_feature (1094)..(1094): n is a, c, g, or t
  misc_feature (1098)..(1098): n is a, c, g, or t
  misc_feature (1100)..(1100): n is a, c, g, or t
  misc_feature (1103)..(1103): n is a, c, g, or t
  misc_feature (1114)..(1115): n is a, c, g, or t
  misc_feature (1117)..(1117): n is a, c, g, or t
  misc_feature (1122)..(1122): n is a, c, g, or t
  misc_feature (1124)..(1124): n is a, c, g, or t
  misc_feature (1134)..(1134): n is a, c, g, or t
  misc_feature (1138)..(1138): n is a, c, g, or t
  misc_feature (1162)..(1162): n is a, c, g, or t
  misc_feature (1164)..(1164): n is a, c, g, or t
  misc_feature (1166)..(1166): n is a, c, g, or t
  misc_feature (1168)..(1168): n is a, c, g, or t
  misc_feature (1174)..(1174): n is a, c, g, or t
  misc_feature (1176)..(1176): n is a, c, g, or t
  misc_feature (1183)..(1183): n is a, c, g, or t
  misc_feature (1196)..(1196): n is a, c, g, or t
  misc_feature (1200)..(1200): n is a, c, g, or t
  misc_feature (1202)..(1203): n is a, c, g, or t
  misc_feature (1207)..(1207): n is a, c, g, or t
  misc_feature (1212)..(1212): n is a, c, g, or t
  misc_feature (1217)..(1218): n is a, c, g, or t
  misc_feature (1221)..(1221): n is a, c, g, or t
  misc_feature (1226)..(1226): n is a, c, g, or t
  misc_feature (1241)..(1241): n is a, c, g, or t
  misc_feature (1246)..(1246): n is a, c, g, or t
  misc_feature (1254)..(1254): n is a, c, g, or t
  misc_feature (1279)..(1280): n is a, c, g, or t
  misc_feature (1282)..(1282): n is a, c, g, or t
  misc_feature (1284)..(1349): n is a, c, g, or t
  misc_feature (1355)..(1355): n is a, c, g, or t
  misc_feature (1358)..(1366): n is a, c, g, or t
  misc_feature (1368)..(1373): n is a, c, g, or t
  misc_feature (1376)..(1382): n is a, c, g, or t
  misc_feature (1384)..(1384): n is a, c, g, or t
  misc_feature (1386)..(1386): n is a, c, g, or t
  misc_feature (1388)..(1388): n is a, c, g, or t
  misc_feature (1392)..(1397): n is a, c, g, or t
tagagaaattactatgagaggatcgcatcaccatcaccatcacggatcctatttaggtgacactatagaatcgtcgacccacgcgtccgggctgctggaggcgcgggccgggcggtgcgcactgcgggcgcatccctgccccggcgccgtccgtgcccgcgggacctgacagccgggtcagagggcgaagctgtgctcaggcccgggctggacgcagagccagagctgcccccagaggagcagagggtcctggaaaggaagctgaaaaaggaacggaagaaagaggagaggcagcgtctgcgggaggcaggccttgtggcccagcacccgcctgccaggcgctcgggggccgaactggccctggactacctctgcagatgggcccaaaagcacaagaactggaggtttcagaagacgaggcagacgtggctcctgctgcacatgtatgacagtgacaaggttcccgatgagcacttctccaccctgctggcctacctggaggggctgcagggccgggcccgagagctgacggtgcagaaggcggaagccctgatgcgggagctggatgaggagggctctgatccccccctgccggggagggcccagcgcatccgacaggtgctgcagctgctctcctagtgggttcagcgcggggcggggccgctgcccagtgcagggctgcctcagaccacacagggtgcagctcctccggcggtgggggccgggttcaccagcagggcagcggctgancaagggctttcagctcctccggtggtgggggccgggatcaccagcaccagagcctcgcaagggcccccttccctcctccagaccctccttggccggttgacggctgtgacagtgatggcaggtttcagtgcctttcagcgcaaancgtggatgctctggaatcacccggaacccctggnccttgganggnacccttcnagccccangaattttnctttgganggaaatgtctntttttttaccgggaaatatttttaaaaatnggggnatgctggcttccttcccccnagnttgaaaacttgccnctttcnccttanttcccnaattcccntgcgngggcccanttcntngtncccttgcctgnntnccttnanggggcctggntttngccttttttttcttttaacccccnanancntctttncnggttttngggaaccccctgntggnanntttngaatncaatnnttnctttnaaaaacccccttttngtttnttttaaanaaaccccccccccccccaaaaaaannanannnnnnnnnnnnnnnnnnnnnnnnnnnnnnnnnnnnnnnnnnnnnnnnnnnnnnnnnnnnnnnnnncccccnttnnnnnnnnnannnnnnttnnnnnnncncntntaannnnnn

SEQ ID NO: 939 - DNA, 1200 bp, Homo Sapiens
  misc_feature (871)..(871): n is a, c, g, or t
  misc_feature (880)..(880): n is a, c, g, or t
  misc_feature (895)..(895): n is a, c, g, or t
  misc_feature (943)..(943): n is a, c, g, or t
  misc_feature (953)..(953): n is a, c, g, or t
  misc_feature (979)..(979): n is a, c, g, or t
  misc_feature (986)..(986): n is a, c, g, or t
  misc_feature (1011)..(1011): n is a, c, g, or t
  misc_feature (1023)..(1023): n is a, c, g, or t
  misc_feature (1035)..(1035): n is a, c, g, or t
  misc_feature (1042)..(1042): n is a, c, g, or t
  misc_feature (1056)..(1056): n is a, c, g, or t
  misc_feature (1072)..(1072): n is a, c, g, or t
  misc_feature (1079)..(1079): n is a, c, g, or t
  misc_feature (1087)..(1087): n is a, c, g, or t
  misc_feature (1089)..(1091): n is a, c, g, or t
  misc_feature (1099)..(1099): n is a, c, g, or t
  misc_feature (1101)..(1101): n is a, c, g, or t
  misc_feature (1110)..(1110): n is a, c, g, or t
  misc_feature (1132)..(1132): n is a, c, g, or t
  misc_feature (1134)..(1134): n is a, c, g, or t
  misc_feature (1144)..(1144): n is a, c, g, or t
  misc_feature (1147)..(1147): n is a, c, g, or t
  misc_feature (1149)..(1149): n is a, c, g, or t
  misc_feature (1153)..(1153): n is a, c, g, or t
  misc_feature (1167)..(1167): n is a, c, g, or t
  misc_feature (1174)..(1175): n is a, c, g, or t
  misc_feature (1189)..(1189): n is a, c, g, or t
  misc_feature (1191)..(1191): n is a, c, g, or t
  misc_feature (1193)..(1193): n is a, c, g, or t
  misc_feature (1198)..(1198): n is a, c, g, or t
tagagaaattactatgagaggatcgcatcaccatcaccatcacggatcctatttaggtgacactatagaatcgtcgacccacgcgtccgcccacgcgtccggtccatggcggcgcttgacctgcgagcggagctggattcgctggtcctgcagctgcttggggacctggaggagctggaggggaaacgaacggtgttgaacgcccgggtggaggagggctggctctcgctcgccaaggctcgctacgcgatgggcgccaagtcggtagggcccctgcagtatgcttcccacatggagccccaggtctgcctccacgccagcgaggcccaggagggactccagaagttcaaggtggtgagagctggtgtccacgccccagaggaggtggggcctcgcgaagcaggtctgcggaggcgcaagggccccactaagaccccagaaccggagtcctctgaggcccctcaggaccccctgaactggtttggaatcctagttcctcacagtctacgtcaggctcaagcaagcttccgggatggcctgcagctggccgcagacatagccagcctccagaaccgcattgactggggtcgaagccagctccggggactccaagagaaactcaagcagctggagcctggggctgcctgacatgcgcgcaaagaggcagggcagcgagcacagctgttctccgacatggctacgtgatctcaggccttcttccttcacaattagctcttgcccctaccccacgccagctaatgccccttctgtgtccctgctctgcatgtttccattttccttaggtgtgaagtttgaagaggcaaacagtaattttgaaagccactactttgaaaccattctaaggcctganttcccatangacacactcacatangcaggtacacgttagtcaacaattggaactgcctcttggatcactcanctgtgctttncatggctggatgatgaacactgtgcnaaaaaanatgggggccaagaaaataacgcttncatgcttaatanatcctccaaatngtctttngctggagaaaaaancgtactccccccaaanatcgganaatatgantnnnttcccaangnaaacaaaancctgaataactgggcacccttngnagggtttaanccngnaaanaaaaatgattttgncctaaanntttaagggaaactntngnaaaangc

SEQ ID NO: 940 - DNA, 741 bp, Homo Sapiens
  misc_feature (1)..(1): n is a, c, g, or t
  misc_feature (682)..(741): n is a, c, g, or t
naaatagagagattactatgagaggatcgcatcaccatcaccatcacggatcctatttaggtgacactatagaatcgtcgacccacgcgtccgcaaaacgctcctggttcgggaacttcatctccttggacaaagaagaacaaatattcctcgtgctaaaggacaaacctctcagcagcatcaaagcagacatcgtccatgcctttctgtcgatccccagcctgagtcacagtgtgctgtcacagaccagcttcagggccgagtacaaggccagtggcggcccctccgtcttccaaaagcccgtccgcttccaggtggacatcagctcctctgagggtccagagccctccccgcgacgggacggcagcggaggtggtggcatctactccgtcaccttcactctcatctcgggtcccagccgtcggttcaagcgagtggtggagaccatccaggcacagctcctgagcactcatgaccagccctccgtgcaggccctggcagacgagaagaacggggcccagacccggcctgctggtgccccaccccgaagcctgcagcccccacccggccgcccagacccagagctgagcagctctccccgccgaggcccccccaaggacaagaagctcctggccaccaacgggacccctctgccctgaccccacggggccggggagggagnnnnnnnnnnnnnnnnnnnnnnnnnnnnnnnnnnnnnnnnnnnnnnnnnnnnnnnnnnnn

SEQ ID NO: 941 - DNA, 1200 bp, Homo Sapiens
  misc_feature (1)..(1): n is a, c, g, or t
  misc_feature (5)..(5): n is a, c, g, or t
  misc_feature (14)..(14): n is a, c, g, or t
  misc_feature (387)..(387): n is a, c, g, or t
  misc_feature (412)..(412): n is a, c, g, or t
  misc_feature (461)..(461): n is a, c, g, or t
  misc_feature (463)..(463): n is a, c, g, or t
  misc_feature (491)..(491): n is a, c, g, or t
  misc_feature (578)..(578): n is a, c, g, or t
  misc_feature (583)..(583): n is a, c, g, or t
  misc_feature (600)..(600): n is a, c, g, or t
  misc_feature (604)..(604): n is a, c, g, or t
  misc_feature (609)..(609): n is a, c, g, or t
  misc_feature (623)..(623): n is a, c, g, or t
  misc_feature (651)..(651): n is a, c, g, or t
  misc_feature (716)..(716): n is a, c, g, or t
  misc_feature (739)..(739): n is a, c, g, or t
  misc_feature (744)..(744): n is a, c, g, or t
  misc_feature (746)..(746): n is a, c, g, or t
  misc_feature (752)..(752): n is a, c, g, or t
  misc_feature (770)..(770): n is a, c, g, or t
  misc_feature (779)..(780): n is a, c, g, or t
  misc_feature (798)..(799): n is a, c, g, or t
  misc_feature (801)..(801): n is a, c, g, or t
  misc_feature (806)..(806): n is a, c, g, or t
  misc_feature (809)..(809): n is a, c, g, or t
  misc_feature (816)..(816): n is a, c, g, or t
  misc_feature (822)..(822): n is a, c, g, or t
  misc_feature (827)..(827): n is a, c, g, or t
  misc_feature (832)..(832): n is a, c, g, or t
  misc_feature (837)..(838): n is a, c, g, or t
  misc_feature (843)..(843): n is a, c, g, or t
  misc_feature (847)..(847): n is a, c, g, or t
  misc_feature (849)..(849): n is a, c, g, or t
  misc_feature (858)..(858): n is a, c, g, or t
  misc_feature (860)..(860): n is a, c, g, or t
  misc_feature (864)..(864): n is a, c, g, or t
  misc_feature (873)..(874): n is a, c, g, or t
  misc_feature (881)..(881): n is a, c, g, or t
  misc_feature (885)..(886): n is a, c, g, or t
  misc_feature (896)..(896): n is a, c, g, or t
  misc_feature (900)..(902): n is a, c, g, or t
  misc_feature (906)..(906): n is a, c, g, or t
  misc_feature (922)..(922): n is a, c, g, or t
  misc_feature (927)..(927): n is a, c, g, or t
  misc_feature (940)..(941): n is a, c, g, or t
  misc_feature (947)..(947): n is a, c, g, or t
  misc_feature (950)..(951): n is a, c, g, or t
  misc_feature (957)..(957): n is a, c, g, or t
  misc_feature (962)..(962): n is a, c, g, or t
  misc_feature (964)..(964): n is a, c, g, or t
  misc_feature (972)..(972): n is a, c, g, or t
  misc_feature (974)..(974): n is a, c, g, or t
  misc_feature (977)..(979): n is a, c, g, or t
  misc_feature (985)..(985): n is a, c, g, or t
  misc_feature (989)..(989): n is a, c, g, or t
  misc_feature (991)..(991): n is a, c, g, or t
  misc_feature (997)..(1000): n is a, c, g, or t
  misc_feature (1015)..(1015): n is a, c, g, or t
  misc_feature (1017)..(1017): n is a, c, g, or t
  misc_feature (1023)..(1023): n is a, c, g, or t
  misc_feature (1025)..(1027): n is a, c, g, or t
  misc_feature (1029)..(1029): n is a, c, g, or t
  misc_feature (1031)..(1031): n is a, c, g, or t
  misc_feature (1037)..(1038): n is a, c, g, or t
  misc_feature (1040)..(1040): n is a, c, g, or t
  misc_feature (1043)..(1043): n is a, c, g, or t
  misc_feature (1047)..(1048): n is a, c, g, or t
  misc_feature (1051)..(1051): n is a, c, g, or t
  misc_feature (1058)..(1059): n is a, c, g, or t
  misc_feature (1064)..(1065): n is a, c, g, or t
  misc_feature (1068)..(1068): n is a, c, g, or t
  misc_feature (1074)..(1074): n is a, c, g, or t
  misc_feature (1076)..(1076): n is a, c, g, or t
  misc_feature (1082)..(1082): n is a, c, g, or t
  misc_feature (1099)..(1099): n is a, c, g, or t
  misc_feature (1107)..(1109): n is a, c, g, or t
  misc_feature (1112)..(1112): n is a, c, g, or t
  misc_feature (1115)..(1115): n is a, c, g, or t
  misc_feature (1117)..(1117): n is a, c, g, or t
  misc_feature (1119)..(1119): n is a, c, g, or t
  misc_feature (1122)..(1123): n is a, c, g, or t
  misc_feature (1126)..(1126): n is a, c, g, or t
  misc_feature (1129)..(1129): n is a, c, g, or t
  misc_feature (1135)..(1135): n is a, c, g, or t
  misc_feature (1137)..(1137): n is a, c, g, or t
  misc_feature (1145)..(1146): n is a, c, g, or t
  misc_feature (1152)..(1153): n is a, c, g, or t
  misc_feature (1159)..(1159): n is a, c, g, or t
  misc_feature (1163)..(1163): n is a, c, g, or t
  misc_feature (1166)..(1166): n is a, c, g, or t
  misc_feature (1168)..(1168): n is a, c, g, or t
  misc_feature (1170)..(1173): n is a, c, g, or t
  misc_feature (1178)..(1178): n is a, c, g, or t
  misc_feature (1180)..(1180): n is a, c, g, or t
  misc_feature (1188)..(1189): n is a, c, g, or t
  misc_feature (1193)..(1193): n is a, c, g, or t
  misc_feature (1196)..(1198): n is a, c, g, or t
ntaangagagaatnactatgagaggatcgcatcaccatcaccatcacggatcctatttaggtgacactatagaatcgtcgacccacgcgtccggcccccgccccgccggctcctctcgcccagcctcccgcctcgcgcctcccgcctcccgcctcccgcctccctccagctgcgagtgcggcctcggctggcggcggcaccaggccacagttgtaagggatcttgtggctgtcaggatggcagaggagcaggagttcacccagctctgcaagttgcctgcacagccctcacacccacactgcgtgaacaacacctaccgcagcgcacagcactcccaggctctgctccgagggctgctggctctccgggacagcggaatcctcttcnatgttgtgctggtggtggagggcanacacatcgaggcccatcgcatcctgctggctgcgtcctgcgattacttnanaggaatgtttgctgggggattgaagganatggaacaggaagaggtcctgatccacggtgtgtcctacaatgctatgtgccaaatcctacatttcatatacacctccgagctgganctcancctgagcaatgtacaanaganactgntggctgcctgccancttcaaatcccagaaattatccatttcngctgtgatttcctcatgtcctggggtgaacgaaaagaacattctcgaatgtctaccggctggcantagctgttttgactttgaaccgnctgantnaaacanactggacacctatattcnttcaaaaanntttgtggacttctctccnnanttganaanataaccntccagntttcnattgnaaaanntctantccncnccctcagtnancaanctgcctggnnggtcttnttgnngaaaaccaangttnnntgangggggcccttttcttntaacnttttaaacccctnngaaaanggnncaaagnttaancnaaaatttntnttnnnataaancccncnaaaaannnnctttaaaaaaaattncngttttncnnntnanggaaanntnaangatnntgncaaacannatgtnnatnaaaatntntggaanctcaacccttttaaagnaaaaaaannngtnaanantnccnntantantaacancngggaaacnnaaaaanntaaaanaccnatncntnnnnaaaantnataaaaannaaanttnnngt

SEQ ID NO: 942 - DNA, 1393 bp, Homo Sapiens
  misc_feature (486)..(486): n is a, c, g, or t
  misc_feature (802)..(802): n is a, c, g, or t
  misc_feature (821)..(821): n is a, c, g, or t
  misc_feature (833)..(833): n is a, c, g, or t
  misc_feature (844)..(844): n is a, c, g, or t
  misc_feature (869)..(869): n is a, c, g, or t
  misc_feature (887)..(887): n is a, c, g, or t
  misc_feature (892)..(893): n is a, c, g, or t
  misc_feature (904)..(904): n is a, c, g, or t
  misc_feature (908)..(909): n is a, c, g, or t
  misc_feature (911)..(911): n is a, c, g, or t
  misc_feature (917)..(917): n is a, c, g, or t
  misc_feature (919)..(919): n is a, c, g, or t
  misc_feature (937)..(939): n is a, c, g, or t
  misc_feature (944)..(945): n is a, c, g, or t
  misc_feature (950)..(950): n is a, c, g, or t
  misc_feature (953)..(953): n is a, c, g, or t
  misc_feature (959)..(959): n is a, c, g, or t
  misc_feature (961)..(961): n is a, c, g, or t
  misc_feature (965)..(965): n is a, c, g, or t
  misc_feature (971)..(972): n is a, c, g, or t
  misc_feature (985)..(985): n is a, c, g, or t
  misc_feature (987)..(988): n is a, c, g, or t
  misc_feature (990)..(990): n is a, c, g, or t
  misc_feature (995)..(997): n is a, c, g, or t
  misc_feature (999)..(1002): n is a, c, g, or t
  misc_feature (1007)..(1008): n is a, c, g, or t
  misc_feature (1010)..(1010): n is a, c, g, or t
  misc_feature (1012)..(1013): n is a, c, g, or t
  misc_feature (1015)..(1017): n is a, c, g, or t
  misc_feature (1021)..(1028): n is a, c, g, or t
  misc_feature (1032)..(1032): n is a, c, g, or t
  misc_feature (1034)..(1034): n is a, c, g, or t
  misc_feature (1036)..(1040): n is a, c, g, or t
  misc_feature (1046)..(1048): n is a, c, g, or t
  misc_feature (1050)..(1050): n is a, c, g, or t
  misc_feature (1052)..(1052): n is a, c, g, or t
  misc_feature (1056)..(1056): n is a, c, g, or t
  misc_feature (1058)..(1061): n is a, c, g, or t
  misc_feature (1071)..(1071): n is a, c, g, or t
  misc_feature (1074)..(1075): n is a, c, g, or t
  misc_feature (1077)..(1078): n is a, c, g, or t
  misc_feature (1082)..(1084): n is a, c, g, or t
  misc_feature (1087)..(1088): n is a, c, g, or t
  misc_feature (1090)..(1092): n is a, c, g, or t
  misc_feature (1096)..(1097): n is a, c, g, or t
  misc_feature (1101)..(1107): n is a, c, g, or t
  misc_feature (1112)..(1112): n is a, c, g, or t
  misc_feature (1118)..(1119): n is a, c, g, or t
  misc_feature (1121)..(1121): n is a, c, g, or t
  misc_feature (1123)..(1123): n is a, c, g, or t
  misc_feature (1125)..(1128): n is a, c, g, or t
  misc_feature (1130)..(1130): n is a, c, g, or t
  misc_feature (1133)..(1136): n is a, c, g, or t
  misc_feature (1143)..(1143): n is a, c, g, or t
  misc_feature (1145)..(1147): n is a, c, g, or t
  misc_feature (1151)..(1153): n is a, c, g, or t
  misc_feature (1157)..(1162): n is a, c, g, or t
  misc_feature (1165)..(1165): n is a, c, g, or t
  misc_feature (1167)..(1172): n is a, c, g, or t
  misc_feature (1174)..(1208): n is a, c, g, or t
  misc_feature (1210)..(1210): n is a, c, g, or t
  misc_feature (1212)..(1212): n is a, c, g, or t
  misc_feature (1217)..(1223): n is a, c, g, or t
  misc_feature (1225)..(1247): n is a, c, g, or t
  misc_feature (1249)..(1253): n is a, c, g, or t
  misc_feature (1255)..(1268): n is a, c, g, or t
  misc_feature (1270)..(1270): n is a, c, g, or t
  misc_feature (1272)..(1304): n is a, c, g, or t
  misc_feature (1306)..(1307): n is a, c, g, or t
  misc_feature (1310)..(1329): n is a, c, g, or t
  misc_feature (1331)..(1335): n is a, c, g, or t
  misc_feature (1338)..(1346): n is a, c, g, or t
  misc_feature (1348)..(1348): n is a, c, g, or t
  misc_feature (1350)..(1361): n is a, c, g, or t
  misc_feature (1363)..(1364): n is a, c, g, or t
  misc_feature (1366)..(1375): n is a, c, g, or t
  misc_feature (1377)..(1384): n is a, c, g, or t
  misc_feature (1386)..(1386): n is a, c, g, or t
  misc_feature (1388)..(1393): n is a, c, g, or t
attagagaaattactatgagaggatcgcatcaccatcaccatcacggatcctatttaggtgacactatagaatcgtcgacccacgcgtccgaccacacggtgcagctgcagctccgcagcctggcacacaacctctcggtggtggccaccaatgacgtgggtgtcaccagtgcgtcgcttccagccccagggcttctggctacccgggtggaagtgccactgctgggcattgttgtggctgctgggcttgcactgggcaccctcgtggggttcagcaccttggtggcctgcctggtctgcagaaaagagaagaaaaccaaaggcccctcccggcacccatctctgatatcaagtgactccaacaacctaaaactcaacaacgtgcgcctgccacgggagaacatgtccctcccgtccaaccttcagctcaatgacctcactccagattccagagcagtgaaaccagcagaccggcagatggctcanaacaacagccggccagagcttctggacccggagcccggcggcctcctcaccagccaaggtttcatccgcctcccagtgctgggctatatctatcgagtgtccagcgtgagcagtgatgagatctggctctgagccgagggcgagacaggagtattctcttggcctctggacaccctcccattcctccaaggcatcctctacctagctaggtcaccaacgtgaagaagttatgccactgccacttttgcttgccctcctggctggggtgccctccatgtcatgcacgtgatgcatttcactgggctgtaacccgcangggcacaggtatctttggnaaggctaccaanttggacgtaancccctcatgctgactcagggtgggncccttgcatgttgaaganttggnnccttccaaaangganntntttggncnagggttgttcaaaatgtnnntccannattcnaantgtggnantggncttgtnntaaacccaccccnannanttccnnnannnnctttnnanannannnatgnnnnnnnncttntntnnnnnaaaagnnnangncccntnnnngaattttccnccnntnnaaannnatnnannntttnntccnnnnnnnaaaantttaannancntnnnnanttnnnnaaaaaanannntttnnntttnnnnnnaanannnnnncnnnnnnnnnnnnnnnnnnnnnnnnnnnnnnnnnnnantnttttnnnnnnnannnnnnnnnnnnnnnnnnnnnnntnnnnntnnnnnnnnnnnnnntntnnnnnnnnnnnnnnnnnnnnnnnnnnnnnnnnntnntannnnnnnnnnnnnnnnnnnnannnnnttnnnnnnnnntntnnnnnnnnnnnnanntnnnnnnnnnntnnnnnnnnanannnnnn

SEQ ID NO: 943 - DNA, 1200 bp, Homo Sapiens
  misc_feature (2)..(2): n is a, c, g, or t
  misc_feature (631)..(631): n is a, c, g, or t
  misc_feature (710)..(710): n is a, c, g, or t
  misc_feature (738)..(738): n is a, c, g, or t
  misc_feature (745)..(745): n is a, c, g, or t
  misc_feature (789)..(789): n is a, c, g, or t
  misc_feature (800)..(800): n is a, c, g, or t
  misc_feature (807)..(807): n is a, c, g, or t
  misc_feature (814)..(814): n is a, c, g, or t
  misc_feature (838)..(838): n is a, c, g, or t
  misc_feature (867)..(867): n is a, c, g, or t
  misc_feature (884)..(884): n is a, c, g, or t
  misc_feature (886)..(886): n is a, c, g, or t
  misc_feature (890)..(891): n is a, c, g, or t
  misc_feature (899)..(899): n is a, c, g, or t
  misc_feature (903)..(904): n is a, c, g, or t
  misc_feature (907)..(908): n is a, c, g, or t
  misc_feature (911)..(911): n is a, c, g, or t
  misc_feature (915)..(915): n is a, c, g, or t
  misc_feature (918)..(918): n is a, c, g, or t
  misc_feature (931)..(931): n is a, c, g, or t
  misc_feature (942)..(942): n is a, c, g, or t
  misc_feature (944)..(944): n is a, c, g, or t
  misc_feature (948)..(948): n is a, c, g, or t
  misc_feature (953)..(953): n is a, c, g, or t
  misc_feature (958)..(958): n is a, c, g, or t
  misc_feature (975)..(975): n is a, c, g, or t
  misc_feature (982)..(982): n is a, c, g, or t
  misc_feature (987)..(987): n is a, c, g, or t
  misc_feature (989)..(989): n is a, c, g, or t
  misc_feature (992)..(992): n is a, c, g, or t
  misc_feature (995)..(995): n is a, c, g, or t
  misc_feature (998)..(1002): n is a, c, g, or t
  misc_feature (1008)..(1008): n is a, c, g, or t
  misc_feature (1010)..(1010): n is a, c, g, or t
  misc_feature (1012)..(1012): n is a, c, g, or t
  misc_feature (1014)..(1014): n is a, c, g, or t
  misc_feature (1018)..(1018): n is a, c, g, or t
  misc_feature (1026)..(1027): n is a, c, g, or t
  misc_feature (1031)..(1031): n is a, c, g, or t
  misc_feature (1033)..(1034): n is a, c, g, or t
  misc_feature (1048)..(1048): n is a, c, g, or t
  misc_feature (1068)..(1068): n is a, c, g, or t
  misc_feature (1073)..(1074): n is a, c, g, or t
  misc_feature (1077)..(1078): n is a, c, g, or t
  misc_feature (1085)..(1085): n is a, c, g, or t
  misc_feature (1093)..(1094): n is a, c, g, or t
  misc_feature (1096)..(1096): n is a, c, g, or t
  misc_feature (1100)..(1101): n is a, c, g, or t
  misc_feature (1109)..(1109): n is a, c, g, or t
  misc_feature (1114)..(1114): n is a, c, g, or t
  misc_feature (1118)..(1119): n is a, c, g, or t
  misc_feature (1125)..(1125): n is a, c, g, or t
  misc_feature (1127)..(1127): n is a, c, g, or t
  misc_feature (1129)..(1129): n is a, c, g, or t
  misc_feature (1140)..(1140): n is a, c, g, or t
  misc_feature (1157)..(1157): n is a, c, g, or t
  misc_feature (1160)..(1160): n is a, c, g, or t
  misc_feature (1163)..(1163): n is a, c, g, or t
  misc_feature (1168)..(1168): n is a, c, g, or t
  misc_feature (1173)..(1173): n is a, c, g, or t
  misc_feature (1177)..(1183): n is a, c, g, or t
  misc_feature (1194)..(1194): n is a, c, g, or t
  misc_feature (1196)..(1196): n is a, c, g, or t
antagagaaattactatgagaggatcgcatcaccatcaccatcacgggatcctatttaggtgacactatagaatcgtcgacccacgcgtccgctcaaggtcttggagatctcccactggccctcaacctgacgtccctgtccatcacacactgcaatctgaccgctgtgccctacctggccgtccgccacctagtctatctccgcttcctcaacctctcctacaaccccatcagcaccattgagggctccatgttgcatgagctgctccggctgcaggagatccagctggtgggcgggcagctggccgtggtggagccctatgccttccgcggcctcaactacctgcgcgtgctcaatgtctctggcaaccagctgaccacactggaggaatcagtcttccactcggtgggcaacctggagacactcatcctggactctaacccgctggcctgcgactgtcggctcctgtgggtgttccggcgccgctggcggctcaacttcaaccggcagcagcccacgtgcgccacgcccgagtttgtccagggcaaggagttcaaggacttccctgatgtgctactgcccaactacttcacctgccgccgcgcccgcatccgggaccgcaaggcccancaggtgtttgtggacgagggccacacggtgcagtttgtgtgccgggccgatggcgacccgacgcccgccatcctctggntctcaccccgaaagcacctggttctcanccaagancaatgggcggctcacaagtcttccctgaatggcaacgctggaangtgcgctacgnccaggtnaaagganaaacgggcacgtaccttgtgcatncgcggacaaacagcggggcggaaaagganttccattgccccgcccnanatgnntttgtgcncaanntanntcncccnaantggcccccatcanccaaaaaaaancnttcnttttnatttncaacaatccggccaaangaaaaanggccnanaancanccnnnnnccactngngnantttncccttttnnaaantnnaaaaaccttcattnattccccaaccacaatgggnttttnnttnnttttccnggggggannancctnnttttggcnggggntttnntttttntngngaaacccgggncaagggctaaacaaaanaantanattcnaaatnctannnnnnntccccaaaatntnaaaa

SEQ ID NO: 944 - DNA, 1334 bp, Homo Sapiens
  misc_feature (879)..(879): n is a, c, g, or t
  misc_feature (882)..(882): n is a, c, g, or t
  misc_feature (896)..(896): n is a, c, g, or t
  misc_feature (957)..(957): n is a, c, g, or t
  misc_feature (974)..(974): n is a, c, g, or t
  misc_feature (1018)..(1018): n is a, c, g, or t
  misc_feature (1034)..(1034): n is a, c, g, or t
  misc_feature (1040)..(1040): n is a, c, g, or t
  misc_feature (1062)..(1062): n is a, c, g, or t
  misc_feature (1088)..(1088): n is a, c, g, or t
  misc_feature (1096)..(1096): n is a, c, g, or t
  misc_feature (1104)..(1104): n is a, c, g, or t
  misc_feature (1106)..(1106): n is a, c, g, or t
  misc_feature (1126)..(1127): n is a, c, g, or t
  misc_feature (1130)..(1130): n is a, c, g, or t
  misc_feature (1132)..(1134): n is a, c, g, or t
  misc_feature (1166)..(1166): n is a, c, g, or t
  misc_feature (1169)..(1169): n is a, c, g, or t
  misc_feature (1174)..(1174): n is a, c, g, or t
  misc_feature (1177)..(1177): n is a, c, g, or t
  misc_feature (1179)..(1179): n is a, c, g, or t
  misc_feature (1181)..(1181): n is a, c, g, or t
  misc_feature (1185)..(1185): n is a, c, g, or t
  misc_feature (1188)..(1188): n is a, c, g, or t
  misc_feature (1191)..(1191): n is a, c, g, or t
  misc_feature (1197)..(1197): n is a, c, g, or t
  misc_feature (1201)..(1202): n is a, c, g, or t
  misc_feature (1204)..(1204): n is a, c, g, or t
  misc_feature (1206)..(1206): n is a, c, g, or t
  misc_feature (1208)..(1208): n is a, c, g, or t
  misc_feature (1212)..(1215): n is a, c, g, or t
  misc_feature (1230)..(1230): n is a, c, g, or t
  misc_feature (1233)..(1234): n is a, c, g, or t
  misc_feature (1239)..(1239): n is a, c, g, or t
  misc_feature (1245)..(1245): n is a, c, g, or t
  misc_feature (1250)..(1250): n is a, c, g, or t
  misc_feature (1258)..(1258): n is a, c, g, or t
  misc_feature (1264)..(1264): n is a, c, g, or t
  misc_feature (1277)..(1277): n is a, c, g, or t
  misc_feature (1282)..(1282): n is a, c, g, or t
  misc_feature (1285)..(1288): n is a, c, g, or t
  misc_feature (1293)..(1293): n is a, c, g, or t
  misc_feature (1296)..(1296): n is a, c, g, or t
  misc_feature (1298)..(1298): n is a, c, g, or t
  misc_feature (1309)..(1309): n is a, c, g, or t
  misc_feature (1312)..(1312): n is a, c, g, or t
  misc_feature (1320)..(1322): n is a, c, g, or t
  misc_feature (1327)..(1327): n is a, c, g, or t
  misc_feature (1329)..(1330): n is a, c, g, or t
  misc_feature (1332)..(1334): n is a, c, g, or t
gagaaattactatgagaggatcgcatcaccatcaccatcacggatcctatttaggtgacactatagaatcgtcgacccacgcgtccgccatggctgagctgcagcagctccgggtgcaggaggcggtggagtccatggtgaagagtctggaaagagagaacatccggaagatgcagggtctcatgttccggtgcagcgccagctgttgtgaggacagccaggcctccatgaagcaggtgcaccagtgcatcgagcgctgccatgtgcctctggctcaagcccaggctttggtcaccagtgagctggagaagttccaggaccgcctggcccggtgcaccatgcattgcaatgacaaagccaaagattcaatagatgctgggagtaaggagcttcaggtgaagcagcagctggacagttgtgtgaccaagtgtgtggatgaccacatgcacctcatcccaactatgaccaagaagatgaaggaggctctcttatcaattggaaaataaaagtatttgccagtggccatcagggctgagggcaagaatatattttttataaggaattgggaattttagtcttttaagcaaagtttacgaatgaagaaatgaaggatggccacaagcgtaaggcatatgtcacttgcctctggacactggttattttatgtttcagtccctaaaaaatgaaatggaaaaaagtggtgctaaatcgagtcagagatattacaggagagttttagagcttattatttcctgtggccagtgcttgtcctggcagtaaggctctcccctgtaacaagccagagccctccaaggtaccagactcttcttactacacaggtactaacaggctggcaggttaaagttggtggagtctganganagatatttttctcntttgttgccaacatcctgtttaccaaaagtgtcaccccaccatcttccataagctgtgaancaaaatcaatgaggtcnctaacttaaaagggaaaaaaagttttctgggtctttgttttctngatttgggggtaattnatacanggcatacaagttgattttaaangtggaactggggaggtaaactaattngaaaaaanctttgaangntccttgggaatccccatttnnggncnnnaaaaggggaaggacattttttaaaaatataanagngggcnccntncncccnggnaantgggcnaaanntngnangggnnnnaccccttttttgggnaannaaatnttgggngaggnccccgagngggggnaaaaaaaaaaagnaaaanttnnnnaaacnttncnttttaaaaaanggntttttttnnnaaaanannannn

SEQ ID NO: 945 - DNA, 1278 bp, Homo Sapiens
  misc_feature (7)..(7): n is a, c, g, or t
  misc_feature (902)..(902): n is a, c, g, or t
  misc_feature (966)..(966): n is a, c, g, or t
  misc_feature (974)..(974): n is a, c, g, or t
  misc_feature (982)..(982): n is a, c, g, or t
  misc_feature (987)..(987): n is a, c, g, or t
  misc_feature (1008)..(1008): n is a, c, g, or t
  misc_feature (1018)..(1018): n is a, c, g, or t
  misc_feature (1037)..(1037): n is a, c, g, or t
  misc_feature (1046)..(1046): n is a, c, g, or t
  misc_feature (1059)..(1059): n is a, c, g, or t
  misc_feature (1063)..(1063): n is a, c, g, or t
  misc_feature (1086)..(1086): n is a, c, g, or t
  misc_feature (1089)..(1089): n is a, c, g, or t
  misc_feature (1099)..(1099): n is a, c, g, or t
  misc_feature (1113)..(1113): n is a, c, g, or t
  misc_feature (1120)..(1120): n is a, c, g, or t
  misc_feature (1122)..(1123): n is a, c, g, or t
  misc_feature (1125)..(1125): n is a, c, g, or t
  misc_feature (1133)..(1151): n is a, c, g, or t
  misc_feature (1158)..(1158): n is a, c, g, or t
  misc_feature (1167)..(1167): n is a, c, g, or t
  misc_feature (1169)..(1170): n is a, c, g, or t
  misc_feature (1187)..(1187): n is a, c, g, or t
  misc_feature (1191)..(1191): n is a, c, g, or t
  misc_feature (1193)..(1193): n is a, c, g, or t
  misc_feature (1195)..(1195): n is a, c, g, or t
  misc_feature (1209)..(1209): n is a, c, g, or t
  misc_feature (1215)..(1215): n is a, c, g, or t
  misc_feature (1218)..(1218): n is a, c, g, or t
  misc_feature (1220)..(1221): n is a, c, g, or t
  misc_feature (1230)..(1230): n is a, c, g, or t
  misc_feature (1234)..(1234): n is a, c, g, or t
  misc_feature (1241)..(1241): n is a, c, g, or t
  misc_feature (1252)..(1252): n is a, c, g, or t
  misc_feature (1255)..(1255): n is a, c, g, or t
  misc_feature (1261)..(1261): n is a, c, g, or t
  misc_feature (1266)..(1266): n is a, c, g, or t
  misc_feature (1268)..(1268): n is a, c, g, or t
  misc_feature (1271)..(1271): n is a, c, g, or t
  misc_feature (1278)..(1278): n is a, c, g, or t
tagaggnaattactatgagaggatcgcatcaccatcaccatcacggatcctatttaggtgacactatagaatcgtcgacccacgcgtccgccttcatagaaaagtcaagcctcagtgtccatccaagtaatcttatggaaaagaagccctctgcctacaacaaatatgggaaattcctctgcagaaagcctgtttttattatgcctcagagacctcaaacagaagagaaaccctttcactgtccttactgtgggaataactttagaaggaagtcatacctcattgaacatcagcgaattcacacaggtgaaaaaccttatgtttgcaatcaatgtggaaaggccttccgtcagaagacagccctcacccttcatgagaaaacacatatagaggggaaaccctttatttgtatcgattgtgggaagtccttccgccagaaggccaccctcactagacatcacaaaacacatacgggggagaaagcctatgaatgtcctcagtgtggaagtgcctttaggaagaagtcatacctcattgatcaccagagaactcacacaggagagaaaccgtatcagtgtaatgagtgtgggaaggcatttatccagaagacaaccctcactgttcatcagagaactcacacaggagagaaaccctatatttgcaatgaatgtgggaagtccttctgccaaaagacaaccctcactctccaccagagaattcacacgggggaaaaaccctatatttgtaatgaatgtgggaagtccttccgccagaaggcaatcctcactgttcatcacagaatacatacaggagaaaaatccaatgggtgtcctcagtgtgggaaagccttcagtaggaaatcaaacctcattcgccatcagaaaactcacacaggcgagaanccatatgaatgtaaacagtgtgggaagtttcttcagttgtaagtcaaacctcattgtccatcanaaaactcncaaggtanaaccncgggaattcagtaagtaatgnggcttttttngtaaaaaatgttaagtcanagtaaaccnggtaaatgatgtngctngcagcgtaatatccacagtttanggnactatacccntgggaacccacggnttgcccncnngnaaaaaaannnnnnnnnnnnnnnnnnnccccccnatttttttnannaatttaaggaaaaatcnttanangnccaacttttttttntacaanctncnnaaaaaaaanttcnctggggnggggttaaaanttnaaaacnctttncnttnccaaaan

SEQ ID NO: 946 - DNA, 1374 bp, Homo Sapiens
  misc_feature (852)..(852): n is a, c, g, or t
  misc_feature (858)..(858): n is a, c, g, or t
  misc_feature (891)..(891): n is a, c, g, or t
  misc_feature (929)..(929): n is a, c, g, or t
  misc_feature (934)..(934): n is a, c, g, or t
  misc_feature (939)..(939): n is a, c, g, or t
  misc_feature (944)..(944): n is a, c, g, or t
  misc_feature (950)..(950): n is a, c, g, or t
  misc_feature (973)..(973): n is a, c, g, or t
  misc_feature (1004)..(1004): n is a, c, g, or t
  misc_feature (1009)..(1009): n is a, c, g, or t
  misc_feature (1012)..(1012): n is a, c, g, or t
  misc_feature (1016)..(1016): n is a, c, g, or t
  misc_feature (1020)..(1020): n is a, c, g, or t
  misc_feature (1042)..(1042): n is a, c, g, or t
  misc_feature (1050)..(1050): n is a, c, g, or t
  misc_feature (1052)..(1052): n is a, c, g, or t
  misc_feature (1090)..(1090): n is a, c, g, or t
  misc_feature (1099)..(1099): n is a, c, g, or t
  misc_feature (1106)..(1106): n is a, c, g, or t
  misc_feature (1109)..(1109): n is a, c, g, or t
  misc_feature (1114)..(1114): n is a, c, g, or t
  misc_feature (1120)..(1120): n is a, c, g, or t
  misc_feature (1127)..(1127): n is a, c, g, or t
  misc_feature (1129)..(1129): n is a, c, g, or t
  misc_feature (1148)..(1148): n is a, c, g, or t
  misc_feature (1166)..(1167): n is a, c, g, or t
  misc_feature (1170)..(1172): n is a, c, g, or t
  misc_feature (1175)..(1175): n is a, c, g, or t
  misc_feature (1185)..(1185): n is a, c, g, or t
  misc_feature (1187)..(1187): n is a, c, g, or t
  misc_feature (1194)..(1195): n is a, c, g, or t
  misc_feature (1202)..(1202): n is a, c, g, or t
  misc_feature (1204)..(1204): n is a, c, g, or t
  misc_feature (1209)..(1209): n is a, c, g, or t
  misc_feature (1225)..(1225): n is a, c, g, or t
  misc_feature (1231)..(1231): n is a, c, g, or t
  misc_feature (1233)..(1233): n is a, c, g, or t
  misc_feature (1239)..(1239): n is a, c, g, or t
  misc_feature (1243)..(1245): n is a, c, g, or t
  misc_feature (1253)..(1254): n is a, c, g, or t
  misc_feature (1256)..(1256): n is a, c, g, or t
  misc_feature (1261)..(1262): n is a, c, g, or t
  misc_feature (1265)..(1266): n is a, c, g, or t
  misc_feature (1289)..(1289): n is a, c, g, or t
  misc_feature (1292)..(1292): n is a, c, g, or t
  misc_feature (1295)..(1295): n is a, c, g, or t
  misc_feature (1299)..(1299): n is a, c, g, or t
  misc_feature (1305)..(1305): n is a, c, g, or t
  misc_feature (1313)..(1316): n is a, c, g, or t
  misc_feature (1322)..(1322): n is a, c, g, or t
  misc_feature (1324)..(1325): n is a, c, g, or t
  misc_feature (1329)..(1329): n is a, c, g, or t
  misc_feature (1332)..(1333): n is a, c, g, or t
  misc_feature (1343)..(1343): n is a, c, g, or t
  misc_feature (1345)..(1345): n is a, c, g, or t
  misc_feature (1348)..(1348): n is a, c, g, or t
  misc_feature (1357)..(1358): n is a, c, g, or t
  misc_feature (1361)..(1361): n is a, c, g, or t
  misc_feature (1365)..(1366): n is a, c, g, or t
  misc_feature (1369)..(1369): n is a, c, g, or t
agagaaattactatgagaggatcgcatcaccatcaccatcacggatcctatttaggtgacactatagaatcgtcgacccacgcgtccgcgccgggtcctggggctgcacgtgtggtgaggcctacagaagcggccttcagctggaccttggtctccccgccggacttcgagggtgtcatcgccgcccctgttgggggtgagcgccgcgcggctgcagcatgcctcacaggaagaaaaagccctttatagagaagaagaaagctgtgtcttttcacttggtccaccggagccaacgagatcctttagcagcagatgagagtgcaccccagagggttctattgcccacacaaaaaatagacaatgaagaaaggcgagcagaacagaggaagtatggagtgttctttgatgacgactatgactacctgcagcacctgaaggaaccatctgggccttcagagcttattccctcaagtaccttcagtgcacacaacaggagagaggagaaagaagaaacgctagtaattccaagcactggaattaagttgccttcatcagtgtttgcttcagagtttgaggaagatgttggattgttaaataaagcagctccagtttcaggacctcgactggattttgatcctgacattgttgcagctcttgatgatgattttgactttgatgatccagataatctgcttgaggatgactttattcttcaggccaataaggcaacaggagaggaagagggaatggatatacagaaatctgagaatgaagatgacagcgagtgggaagatgtggatgatgagaagggagatagcaatgatgactatgactctgcaggcctattgtcanatgaanactgtatgtctgtgcccggaaaaactcacaganctatagcaaatcacttgttctggagtgaggaaacaaanagtcncttcncggantattcnatgacttcctcagtcatgagganaaatgaacagctgaccctacatgatgaaggnttganaantttntgancatatgatgagatgaattgganctctgganangcaaattggaagttctttcagtggacagcatcccttanggaagtttngatgacnctnaaaanaaaggnaaaaatngntaattgaaaccctgaaccntggagaaaaaactgccannaannnctngataaccgananaaaaatnnttgtttntnaaaanccaaaaagggatggancttttnanaaaccnattnnnaccccccnntnaagtnnccnnccaaaatttaatttttaaagganttnttntttnaaaagnccccaaannnnaaaaananngggnttnnaaaccccccntnaanaaaaaaaannctnaaannganggaaa

SEQ ID NO: 947 - DNA, 1658 bp, Homo Sapiens
  misc_feature (1)..(1): n is a, c, g, or t
  misc_feature (10)..(11): n is a, c, g, or t
  misc_feature (16)..(16): n is a, c, g, or t
  misc_feature (18)..(18): n is a, c, g, or t
  misc_feature (20)..(20): n is a, c, g, or t
  misc_feature (22)..(22): n is a, c, g, or t
  misc_feature (30)..(30): n is a, c, g, or t
  misc_feature (36)..(37): n is a, c, g, or t
  misc_feature (40)..(40): n is a, c, g, or t
  misc_feature (52)..(52): n is a, c, g, or t
  misc_feature (56)..(57): n is a, c, g, or t
  misc_feature (59)..(59): n is a, c, g, or t
  misc_feature (63)..(63): n is a, c, g, or t
  misc_feature (81)..(81): n is a, c, g, or t
  misc_feature (87)..(87): n is a, c, g, or t
  misc_feature (91)..(92): n is a, c, g, or t
  misc_feature (96)..(96): n is a, c, g, or t
  misc_feature (103)..(103): n is a, c, g, or t
  misc_feature (117)..(117): n is a, c, g, or t
  misc_feature (121)..(122): n is a, c, g, or t
  misc_feature (130)..(130): n is a, c, g, or t
  misc_feature (132)..(132): n is a, c, g, or t
  misc_feature (139)..(139): n is a, c, g, or t
  misc_feature (142)..(142): n is a, c, g, or t
  misc_feature (148)..(148): n is a, c, g, or t
  misc_feature (153)..(153): n is a, c, g, or t
  misc_feature (159)..(160): n is a, c, g, or t
  misc_feature (163)..(163): n is a, c, g, or t
  misc_feature (165)..(167): n is a, c, g, or t
  misc_feature (169)..(169): n is a, c, g, or t
  misc_feature (180)..(180): n is a, c, g, or t
  misc_feature (187)..(187): n is a, c, g, or t
  misc_feature (191)..(191): n is a, c, g, or t
  misc_feature (202)..(202): n is a, c, g, or t
  misc_feature (206)..(208): n is a, c, g, or t
  misc_feature (210)..(210): n is a, c, g, or t
  misc_feature (212)..(212): n is a, c, g, or t
  misc_feature (217)..(219): n is a, c, g, or t
  misc_feature (221)..(221): n is a, c, g, or t
  misc_feature (226)..(226): n is a, c, g, or t
  misc_feature (228)..(229): n is a, c, g, or t
  misc_feature (232)..(234): n is a, c, g, or t
  misc_feature (236)..(237): n is a, c, g, or t
  misc_feature (240)..(243): n is a, c, g, or t
  misc_feature (246)..(246): n is a, c, g, or t
  misc_feature (249)..(249): n is a, c, g, or t
  misc_feature (251)..(251): n is a, c, g, or t
  misc_feature (253)..(253): n is a, c, g, or t
  misc_feature (255)..(257): n is a, c, g, or t
  misc_feature (259)..(259): n is a, c, g, or t
  misc_feature (266)..(266): n is a, c, g, or t
  misc_feature (271)..(271): n is a, c, g, or t
  misc_feature (277)..(277): n is a, c, g, or t
  misc_feature (279)..(280): n is a, c, g, or t
  misc_feature (286)..(286): n is a, c, g, or t
  misc_feature (291)..(291): n is a, c, g, or t
  misc_feature (296)..(297): n is a, c, g, or t
  misc_feature (299)..(302): n is a, c, g, or t
  misc_feature (304)..(304): n is a, c, g, or t
  misc_feature (307)..(311): n is a, c, g, or t
  misc_feature (327)..(327): n is a, c, g, or t
  misc_feature (340)..(341): n is a, c, g, or t
  misc_feature (349)..(349): n is a, c, g, or t
  misc_feature (358)..(358): n is a, c, g, or t
  misc_feature (364)..(364): n is a, c, g, or t
  misc_feature (366)..(366): n is a, c, g, or t
  misc_feature (371)..(373): n is a, c, g, or t
  misc_feature (375)..(376): n is a, c, g, or t
  misc_feature (379)..(379): n is a, c, g, or t
  misc_feature (383)..(383): n is a, c, g, or t
  misc_feature (386)..(386): n is a, c, g, or t
  misc_feature (388)..(389): n is a, c, g, or t
  misc_feature (393)..(393): n is a, c, g, or t
  misc_feature (397)..(397): n is a, c, g, or t
  misc_feature (401)..(402): n is a, c, g, or t
  misc_feature (407)..(407): n is a, c, g, or t
  misc_feature (411)..(411): n is a, c, g, or t
  misc_feature (414)..(414): n is a, c, g, or t
  misc_feature (416)..(416): n is a, c, g, or t
  misc_feature (419)..(420): n is a, c, g, or t
  misc_feature (423)..(423): n is a, c, g, or t
  misc_feature (426)..(427): n is a, c, g, or t
  misc_feature (440)..(440): n is a, c, g, or t
  misc_feature (444)..(444): n is a, c, g, or t
  misc_feature (448)..(448): n is a, c, g, or t
  misc_feature (451)..(451): n is a, c, g, or t
  misc_feature (457)..(458): n is a, c, g, or t
  misc_feature (462)..(462): n is a, c, g, or t
  misc_feature (465)..(465): n is a, c, g, or t
  misc_feature (467)..(467): n is a, c, g, or t
  misc_feature (470)..(470): n is a, c, g, or t
  misc_feature (473)..(474): n is a, c, g, or t
  misc_feature (478)..(479): n is a, c, g, or t
  misc_feature (484)..(484): n is a, c, g, or t
  misc_feature (486)..(486): n is a, c, g, or t
  misc_feature (492)..(492): n is a, c, g, or t
  misc_feature (494)..(495): n is a, c, g, or t
  misc_feature (498)..(498): n is a, c, g, or t
  misc_feature (500)..(500): n is a, c, g, or t
  misc_feature (504)..(504): n is a, c, g, or t
  misc_feature (509)..(510): n is a, c, g, or t
  misc_feature (512)..(512): n is a, c, g, or t
  misc_feature (514)..(514): n is a, c, g, or t
  misc_feature (518)..(518): n is a, c, g, or t
  misc_feature (521)..(521): n is a, c, g, or t
  misc_feature (524)..(524): n is a, c, g, or t
  misc_feature (530)..(530): n is a, c, g, or t
  misc_feature (532)..(532): n is a, c, g, or t
  misc_feature (537)..(537): n is a, c, g, or t
  misc_feature (539)..(539): n is a, c, g, or t
  misc_feature (546)..(547): n is a, c, g, or t
  misc_feature (550)..(550): n is a, c, g, or t
  misc_feature (554)..(555): n is a, c, g, or t
  misc_feature (558)..(558): n is a, c, g, or t
  misc_feature (563)..(563): n is a, c, g, or t
  misc_feature (568)..(568): n is a, c, g, or t
  misc_feature (576)..(576): n is a, c, g, or t
  misc_feature (579)..(579): n is a, c, g, or t
  misc_feature (585)..(585): n is a, c, g, or t
  misc_feature (589)..(590): n is a, c, g, or t
  misc_feature (592)..(593): n is a, c, g, or t
  misc_feature (595)..(596): n is a, c, g, or t
  misc_feature (598)..(598): n is a, c, g, or t
  misc_feature (606)..(607): n is a, c, g, or t
  misc_feature (613)..(613): n is a, c, g, or t
  misc_feature (616)..(616): n is a, c, g, or t
  misc_feature (619)..(620): n is a, c, g, or t
  misc_feature (628)..(628): n is a, c, g, or t
  misc_feature (634)..(634): n is a, c, g, or t
  misc_feature (636)..(638): n is a, c, g, or t
  misc_feature (641)..(641): n is a, c, g, or t
  misc_feature (646)..(646): n is a, c, g, or t
  misc_feature (650)..(650): n is a, c, g, or t
  misc_feature (653)..(653): n is a, c, g, or t
  misc_feature (657)..(658): n is a, c, g, or t
  misc_feature (661)..(661): n is a, c, g, or t
  misc_feature (663)..(666): n is a, c, g, or t
  misc_feature (671)..(671): n is a, c, g, or t
  misc_feature (674)..(674): n is a, c, g, or t
  misc_feature (677)..(677): n is a, c, g, or t
  misc_feature (680)..(680): n is a, c, g, or t
  misc_feature (684)..(684): n is a, c, g, or t
  misc_feature (687)..(687): n is a, c, g, or t
  misc_feature (689)..(689): n is a, c, g, or t
  misc_feature (695)..(695): n is a, c, g, or t
  misc_feature (698)..(698): n is a, c, g, or t
  misc_feature (701)..(702): n is a, c, g, or t
  misc_feature (710)..(711): n is a, c, g, or t
  misc_feature (713)..(713): n is a, c, g, or t
  misc_feature (716)..(716): n is a, c, g, or t
  misc_feature (718)..(721): n is a, c, g, or t
  misc_feature (724)..(724): n is a, c, g, or t
  misc_feature (726)..(726): n is a, c, g, or t
  misc_feature (729)..(729): n is a, c, g, or t
  misc_feature (736)..(737): n is a, c, g, or t
  misc_feature (739)..(739): n is a, c, g, or t
  misc_feature (741)..(741): n is a, c, g, or t
  misc_feature (744)..(744): n is a, c, g, or t
  misc_feature (750)..(751): n is a, c, g, or t
  misc_feature (759)..(759): n is a, c, g, or t
  misc_feature (761)..(761): n is a, c, g, or t
  misc_feature (764)..(764): n is a, c, g, or t
  misc_feature (766)..(766): n is a, c, g, or t
  misc_feature (770)..(771): n is a, c, g, or t
  misc_feature (775)..(775): n is a, c, g, or t
  misc_feature (778)..(778): n is a, c, g, or t
  misc_feature (781)..(782): n is a, c, g, or t
  misc_feature (785)..(785): n is a, c, g, or t
  misc_feature (787)..(787): n is a, c, g, or t
  misc_feature (790)..(790): n is a, c, g, or t
  misc_feature (802)..(802): n is a, c, g, or t
  misc_feature (805)..(807): n is a, c, g, or t
  misc_feature (810)..(810): n is a, c, g, or t
  misc_feature (814)..(815): n is a, c, g, or t
  misc_feature (826)..(827): n is a, c, g, or t
  misc_feature (829)..(829): n is a, c, g, or t
  misc_feature (832)..(834): n is a, c, g, or t
  misc_feature (836)..(836): n is a, c, g, or t
  misc_feature (838)..(838): n is a, c, g, or t
  misc_feature (841)..(841): n is a, c, g, or t
  misc_feature (853)..(853): n is a, c, g, or t
  misc_feature (856)..(856): n is a, c, g, or t
  misc_feature (859)..(859): n is a, c, g, or t
  misc_feature (862)..(862): n is a, c, g, or t
  misc_feature (865)..(865): n is a, c, g, or t
  misc_feature (870)..(870): n is a, c, g, or t
  misc_feature (872)..(872): n is a, c, g, or t
  misc_feature (876)..(876): n is a, c, g, or t
  misc_feature (879)..(879): n is a, c, g, or t
  misc_feature (881)..(881): n is a, c, g, or t
  misc_feature (886)..(887): n is a, c, g, or t
  misc_feature (891)..(894): n is a, c, g, or t
  misc_feature (898)..(898): n is a, c, g, or t
  misc_feature (901)..(902): n is a, c, g, or t
  misc_feature (905)..(905): n is a, c, g, or t
  misc_feature (907)..(907): n is a, c, g, or t
  misc_feature (909)..(909): n is a, c, g, or t
  misc_feature (911)..(911): n is a, c, g, or t
  misc_feature (916)..(916): n is a, c, g, or t
  misc_feature (920)..(922): n is a, c, g, or t
  misc_feature (924)..(924): n is a, c, g, or t
  misc_feature (926)..(927): n is a, c, g, or t
  misc_feature (932)..(932): n is a, c, g, or t
  misc_feature (934)..(934): n is a, c, g, or t
  misc_feature (938)..(938): n is a, c, g, or t
  misc_feature (941)..(941): n is a, c, g, or t
  misc_feature (945)..(946): n is a, c, g, or t
  misc_feature (954)..(954): n is a, c, g, or t
  misc_feature (959)..(959): n is a, c, g, or t
  misc_feature (961)..(961): n is a, c, g, or t
  misc_feature (963)..(963): n is a, c, g, or t
  misc_feature (965)..(966): n is a, c, g, or t
  misc_feature (975)..(975): n is a, c, g, or t
  misc_feature (977)..(977): n is a, c, g, or t
  misc_feature (987)..(988): n is a, c, g, or t
  misc_feature (991)..(992): n is a, c, g, or t
  misc_feature (999)..(999): n is a, c, g, or t
  misc_feature (1001)..(1004): n is a, c, g, or t
  misc_feature (1008)..(1008): n is a, c, g, or t
  misc_feature (1022)..(1027): n is a, c, g, or t
  misc_feature (1029)..(1029): n is a, c, g, or t
  misc_feature (1031)..(1032): n is a, c, g, or t
  misc_feature (1034)..(1034): n is a, c, g, or t
  misc_feature (1043)..(1043): n is a, c, g, or t
  misc_feature (1045)..(1045): n is a, c, g, or t
  misc_feature (1050)..(1050): n is a, c, g, or t
  misc_feature (1052)..(1054): n is a, c, g, or t
  misc_feature (1060)..(1060): n is a, c, g, or t
  misc_feature (1066)..(1068): n is a, c, g, or t
  misc_feature (1075)..(1077): n is a, c, g, or t
  misc_feature (1079)..(1080): n is a, c, g, or t
  misc_feature (1084)..(1085): n is a, c, g, or t
  misc_feature (1088)..(1088): n is a, c, g, or t
  misc_feature (1095)..(1095): n is a, c, g, or t
  misc_feature (1097)..(1100): n is a, c, g, or t
  misc_feature (1104)..(1104): n is a, c, g, or t
  misc_feature (1108)..(1108): n is a, c, g, or t
  misc_feature (1111)..(1118): n is a, c, g, or t
  misc_feature (1121)..(1125): n is a, c, g, or t
  misc_feature (1127)..(1128): n is a, c, g, or t
  misc_feature (1130)..(1131): n is a, c, g, or t
  misc_feature (1134)..(1136): n is a, c, g, or t
  misc_feature (1139)..(1139): n is a, c, g, or t
  misc_feature (1143)..(1143): n is a, c, g, or t
  misc_feature (1147)..(1147): n is a, c, g, or t
  misc_feature (1151)..(1152): n is a, c, g, or t
  misc_feature (1154)..(1156): n is a, c, g, or t
  misc_feature (1158)..(1158): n is a, c, g, or t
  misc_feature (1160)..(1160): n is a, c, g, or t
  misc_feature (1165)..(1165): n is a, c, g, or t
  misc_feature (1168)..(1168): n is a, c, g, or t
  misc_feature (1170)..(1170): n is a, c, g, or t
  misc_feature (1173)..(1173): n is a, c, g, or t
  misc_feature (1176)..(1177): n is a, c, g, or t
  misc_feature (1179)..(1182): n is a, c, g, or t
  misc_feature (1185)..(1185): n is a, c, g, or t
  misc_feature (1188)..(1190): n is a, c, g, or t
  misc_feature (1192)..(1192): n is a, c, g, or t
  misc_feature (1198)..(1199): n is a, c, g, or t
  misc_feature (1201)..(1201): n is a, c, g, or t
  misc_feature (1204)..(1205): n is a, c, g, or t
  misc_feature (1211)..(1211): n is a, c, g, or t
  misc_feature (1216)..(1221): n is a, c, g, or t
  misc_feature (1224)..(1226): n is a, c, g, or t
  misc_feature (1228)..(1228): n is a, c, g, or t
  misc_feature (1231)..(1231): n is a, c, g, or t
  misc_feature (1235)..(1235): n is a, c, g, or t
  misc_feature (1242)..(1242): n is a, c, g, or t
  misc_feature (1247)..(1248): n is a, c, g, or t
  misc_feature (1250)..(1250): n is a, c, g, or t
  misc_feature (1252)..(1253): n is a, c, g, or t
  misc_feature (1257)..(1258): n is a, c, g, or t
  misc_feature (1260)..(1260): n is a, c, g, or t
  misc_feature (1265)..(1265): n is a, c, g, or t
  misc_feature (1269)..(1270): n is a, c, g, or t
  misc_feature (1272)..(1273): n is a, c, g, or t
  misc_feature (1275)..(1275): n is a, c, g, or t
  misc_feature (1279)..(1279): n is a, c, g, or t
  misc_feature (1283)..(1283): n is a, c, g, or t
  misc_feature (1289)..(1289): n is a, c, g, or t
  misc_feature (1292)..(1292): n is a, c, g, or t
  misc_feature (1296)..(1296): n is a, c, g, or t
  misc_feature (1300)..(1301): n is a, c, g, or t
  misc_feature (1305)..(1306): n is a, c, g, or t
  misc_feature (1308)..(1308): n is a, c, g, or t
  misc_feature (1311)..(1311): n is a, c, g, or t
  misc_feature (1315)..(1317): n is a, c, g, or t
  misc_feature (1321)..(1321): n is a, c, g, or t
  misc_feature (1329)..(1330): n is a, c, g, or t
  misc_feature (1335)..(1335): n is a, c, g, or t
  misc_feature (1338)..(1338): n is a, c, g, or t
  misc_feature (1349)..(1349): n is a, c, g, or t
  misc_feature (1352)..(1352): n is a, c, g, or t
  misc_feature (1354)..(1354): n is a, c, g, or t
  misc_feature (1356)..(1357): n is a, c, g, or t
  misc_feature (1359)..(1362): n is a, c, g, or t
  misc_feature (1364)..(1364): n is a, c, g, or t
  misc_feature (1369)..(1369): n is a, c, g, or t
  misc_feature (1375)..(1375): n is a, c, g, or t
  misc_feature (1379)..(1379): n is a, c, g, or t
  misc_feature (1383)..(1383): n is a, c, g, or t
  misc_feature (1386)..(1386): n is a, c, g, or t
  misc_feature (1388)..(1388): n is a, c, g, or t
  misc_feature (1394)..(1394): n is a, c, g, or t
  misc_feature (1397)..(1398): n is a, c, g, or t
  misc_feature (1404)..(1405): n is a, c, g, or t
  misc_feature (1407)..(1407): n is a, c, g, or t
  misc_feature (1412)..(1412): n is a, c, g, or t
  misc_feature (1414)..(1414): n is a, c, g, or t
  misc_feature (1417)..(1417): n is a, c, g, or t
  misc_feature (1419)..(1419): n is a, c, g, or t
  misc_feature (1423)..(1423): n is a, c, g, or t
  misc_feature (1428)..(1430): n is a, c, g, or t
  misc_feature (1434)..(1434): n is a, c, g, or t
  misc_feature (1438)..(1438): n is a, c, g, or t
  misc_feature (1448)..(1449): n is a, c, g, or t
  misc_feature (1451)..(1451): n is a, c, g, or t
  misc_feature (1461)..(1462): n is a, c, g, or t
  misc_feature (1464)..(1465): n is a, c, g, or t
  misc_feature (1467)..(1467): n is a, c, g, or t
  misc_feature (1471)..(1471): n is a, c, g, or t
  misc_feature (1473)..(1473): n is a, c, g, or t
  misc_feature (1482)..(1482): n is a, c, g, or t
  misc_feature (1486)..(1486): n is a, c, g, or t
  misc_feature (1493)..(1494): n is a, c, g, or t
  misc_feature (1496)..(1496): n is a, c, g, or t
  misc_feature (1502)..(1502): n is a, c, g, or t
  misc_feature (1505)..(1506): n is a, c, g, or t
  misc_feature (1508)..(1508): n is a, c, g, or t
  misc_feature (1512)..(1512): n is a, c, g, or t
  misc_feature (1515)..(1515): n is a, c, g, or t
  misc_feature (1519)..(1519): n is a, c, g, or t
  misc_feature (1523)..(1524): n is a, c, g, or t
  misc_feature (1538)..(1538): n is a, c, g, or t
  misc_feature (1543)..(1544): n is a, c, g, or t
  misc_feature (1550)..(1552): n is a, c, g, or t
  misc_feature (1554)..(1554): n is a, c, g, or t
  misc_feature (1556)..(1558): n is a, c, g, or t
  misc_feature (1575)..(1575): n is a, c, g, or t
  misc_feature (1579)..(1579): n is a, c, g, or t
  misc_feature (1594)..(1594): n is a, c, g, or t
  misc_feature (1604)..(1604): n is a, c, g, or t
  misc_feature (1606)..(1606): n is a, c, g, or t
  misc_feature (1612)..(1613): n is a, c, g, or t
  misc_feature (1617)..(1617): n is a, c, g, or t
  misc_feature (1619)..(1619): n is a, c, g, or t
  misc_feature (1623)..(1623): n is a, c, g, or t
  misc_feature (1626)..(1626): n is a, c, g, or t
  misc_feature (1631)..(1631): n is a, c, g, or t
  misc_feature (1639)..(1639): n is a, c, g, or t
  misc_feature (1644)..(1644): n is a, c, g, or t
  misc_feature (1648)..(1648): n is a, c, g, or t
  misc_feature (1652)..(1652): n is a, c, g, or t
  misc_feature (1656)..(1656): n is a, c, g, or t
  misc_feature (1658)..(1658): n is a, c, g, or t
naaaaaaatnnaaaanantnangaagaggngggtcnnccnctccctcacccngggnngncatnttttttgggggggagganaaatanaacnntcgncccaccncacgcccgccgggnatgnnagaggttngnagtcgtntcntgggcngtatnctcgannttntnnngncggcatgattncagcctnctgnatgcggtgaanggannnananagcannngnaaagncnntcnnncnngannnngangtncngnannngntacatgnatggncttgangnnattaanggatnatggnncnnnnancannnnntagatggaacaattcnctgaaagtggtcnnagaccacncttttgcgntctcgntngtacnnnanncgngctngananntacnaagntganntgatncttncancnccnncanttnnaagcgaatcatgnctcnactntcncatgannctcnagnanccnganntcanntccangngacatncnngtncnaatntggtnncnanaaanatncancaacgngnccttngntatcatnnccncctnnccnattgncctcntctggaantancctttnactnntnncnncngcctcaannactttnaantgnngaccctgncacacnannnatntggcnattnttnattnntcnannnncaatnacnatnttncacnatngnatcatngtnttnntttaaagnntnttntnnnnacnangantccttannananatngaaagnnttgaatangnaanantctnnagtnttntcnnctnanatntcttagaaatgngtnnntantctnnactttttaagnnanccnnntntnaangaaattttcctnctngtnaanatnataantncctngtntngaacnnttannnncctnacnncgntntnanttttntaannntnannaaatntncccntcnttannaaaaattncattntngnannctagccttngnccatgtacannaannttattcnannnnatantctcaacataatcnnnnnntncnntnttaatcaanantacantnnntatccnagaatnnnaattgtnnnannctannccngttcccngnnnnatcncttntcnnnnnnnnccnnnnnanncnnaannnccncagnattncccnntnnntntnacatngtntnaantanntnnnngtntcnnncntatacnnangtnnaaaacncccannnnnnccnnngnttnctancaggttnctatnngngnncatnncntgccncccnngnntntccncacnttaaanagncctntctnntgtnnantgncctnnnaccntctttcgnncttantcnacagacatttnttntngnncnnnntntatangagttnctangaantananattctntgnnatctcnntnttcancnctntntagnagaannntttnaaancttgtacacnntnatcttaccanntnntncagngntatactatnaatnaatcaanntntatganatnntntcanacnaatntttnnttatagcttaatcntacanntaatgnnncntnnnaatattattgaaataangccnccgcgacaagattanatacaaccantnttctannatangntatnacnactcntatatatnatacncctnattntganan

SEQ ID NO: 948 - DNA, 1285 bp, Homo Sapiens
  misc_feature (802)..(802): n is a, c, g, or t
  misc_feature (854)..(854): n is a, c, g, or t
  misc_feature (876)..(876): n is a, c, g, or t
  misc_feature (902)..(903): n is a, c, g, or t
  misc_feature (940)..(940): n is a, c, g, or t
  misc_feature (949)..(949): n is a, c, g, or t
  misc_feature (958)..(958): n is a, c, g, or t
  misc_feature (966)..(966): n is a, c, g, or t
  misc_feature (968)..(968): n is a, c, g, or t
  misc_feature (971)..(971): n is a, c, g, or t
  misc_feature (975)..(975): n is a, c, g, or t
  misc_feature (982)..(982): n is a, c, g, or t
  misc_feature (996)..(996): n is a, c, g, or t
  misc_feature (1000)..(1000): n is a, c, g, or t
  misc_feature (1010)..(1010): n is a, c, g, or t
  misc_feature (1016)..(1016): n is a, c, g, or t
  misc_feature (1024)..(1024): n is a, c, g, or t
  misc_feature (1035)..(1035): n is a, c, g, or t
  misc_feature (1044)..(1044): n is a, c, g, or t
  misc_feature (1048)..(1048): n is a, c, g, or t
  misc_feature (1052)..(1052): n is a, c, g, or t
  misc_feature (1054)..(1055): n is a, c, g, or t
  misc_feature (1061)..(1061): n is a, c, g, or t
  misc_feature (1063)..(1063): n is a, c, g, or t
  misc_feature (1069)..(1069): n is a, c, g, or t
  misc_feature (1081)..(1082): n is a, c, g, or t
  misc_feature (1086)..(1087): n is a, c, g, or t
  misc_feature (1091)..(1091): n is a, c, g, or t
  misc_feature (1103)..(1104): n is a, c, g, or t
  misc_feature (1113)..(1113): n is a, c, g, or t
  misc_feature (1115)..(1116): n is a, c, g, or t
  misc_feature (1118)..(1119): n is a, c, g, or t
  misc_feature (1125)..(1126): n is a, c, g, or t
  misc_feature (1142)..(1142): n is a, c, g, or t
  misc_feature (1151)..(1151): n is a, c, g, or t
  misc_feature (1155)..(1155): n is a, c, g, or t
  misc_feature (1161)..(1161): n is a, c, g, or t
  misc_feature (1166)..(1166): n is a, c, g, or t
  misc_feature (1171)..(1171): n is a, c, g, or t
  misc_feature (1173)..(1173): n is a, c, g, or t
  misc_feature (1178)..(1178): n is a, c, g, or t
  misc_feature (1188)..(1189): n is a, c, g, or t
  misc_feature (1196)..(1196): n is a, c, g, or t
  misc_feature (1201)..(1201): n is a, c, g, or t
  misc_feature (1203)..(1203): n is a, c, g, or t
  misc_feature (1207)..(1208): n is a, c, g, or t
  misc_feature (1213)..(1213): n is a, c, g, or t
  misc_feature (1215)..(1215): n is a, c, g, or t
  misc_feature (1217)..(1217): n is a, c, g, or t
  misc_feature (1220)..(1221): n is a, c, g, or t
  misc_feature (1223)..(1223): n is a, c, g, or t
  misc_feature (1230)..(1230): n is a, c, g, or t
  misc_feature (1233)..(1233): n is a, c, g, or t
  misc_feature (1235)..(1235): n is a, c, g, or t
  misc_feature (1242)..(1242): n is a, c, g, or t
  misc_feature (1250)..(1251): n is a, c, g, or t
  misc_feature (1255)..(1255): n is a, c, g, or t
  misc_feature (1257)..(1260): n is a, c, g, or t
  misc_feature (1269)..(1269): n is a, c, g, or t
  misc_feature (1271)..(1271): n is a, c, g, or t
  misc_feature (1273)..(1276): n is a, c, g, or t
  misc_feature (1278)..(1279): n is a, c, g, or t
tagagaaattactatgagaggatcgcatcaccatcaccatcacggatcctatttaggtgacactatagaatcgtcgacccacgcgtccgctccaaattggcctctcaactcacaggaagacacagctgcccagagcagcccaggccgtggtgaggaggcggaggcatcggcggcggaggctcagggtggggagcaggcctacctggcaggcctggcagggcagtaccacttggagcggtacccggacagttacgagtccatgtccgagccgcccattgctcatcttttgcgccccgtgcttccccgggccttcgccttccccgtggacccccaggtccagtctgccgctgatgagactgctgtgcagctgagcgagttgctgacgctgcccgtgctcatgaagcgctccatcacggcaccgctggccgcccacatctccttggtgaacaaggccgctgtcgactacttcttcgtggagctgcacctggaggcgcactatgaggcactgcggcacttcctgctgatggaggacggcgagttcgcccagtccctcagcgacctgctctttgagaagcttggagctgggcaaacgcccggagagctgctcaacccgctggtgctgaactctgtgctgagcaaggccctgcagtgcagcctgcatggggacaccccgcacgcctccaacctctccctcgctctcaagtacctgcccgaggtgtttgcccccaacgccccggatgtgctgagctgcctggagctcaggtacaaggtggactggcctctcaacattgtcatcaccganggctgcctgaagcaagtacagcggcgtcttctccttcctgctgcagctgaanctcatgatgtgggcgctcaagnacgtctgctttccaccttcaagcgcnnaagccctgctgaaccaaaatgggccggctctgtgcanttccgtcancttgcaacnttttcaancnacnaaantgcaacnatttcctggaaagntcanccaagggctnaaatcncccaaacnaaaatccttgnaagtttcancctnggtngnnaatttnangggccnaggttttggccnncccnngggnccaaacctgaannaaaaatccnanngnnggcccnncccaaaaaaaacttgnaccaaaggncctnttttanggggncctgntntcccngaaaaagggnngcccccntttangnaaannttttncnanaanntnttttaanccncngggtttnaaatttcnnaaancnnnntttattttncnannnncnngggggg

SEQ ID NO: 949 - DNA, 1428 bp, Homo Sapiens
  misc_feature (877)..(878): n is a, c, g, or t
  misc_feature (893)..(893): n is a, c, g, or t
  misc_feature (897)..(897): n is a, c, g, or t
  misc_feature (931)..(931): n is a, c, g, or t
  misc_feature (940)..(940): n is a, c, g, or t
  misc_feature (943)..(944): n is a, c, g, or t
  misc_feature (959)..(959): n is a, c, g, or t
  misc_feature (970)..(970): n is a, c, g, or t
  misc_feature (979)..(979): n is a, c, g, or t
  misc_feature (983)..(983): n is a, c, g, or t
  misc_feature (1009)..(1010): n is a, c, g, or t
  misc_feature (1012)..(1012): n is a, c, g, or t
  misc_feature (1014)..(1015): n is a, c, g, or t
  misc_feature (1021)..(1021): n is a, c, g, or t
  misc_feature (1027)..(1027): n is a, c, g, or t
  misc_feature (1039)..(1039): n is a, c, g, or t
  misc_feature (1058)..(1058): n is a, c, g, or t
  misc_feature (1063)..(1063): n is a, c, g, or t
  misc_feature (1069)..(1069): n is a, c, g, or t
  misc_feature (1079)..(1080): n is a, c, g, or t
  misc_feature (1082)..(1082): n is a, c, g, or t
  misc_feature (1095)..(1095): n is a, c, g, or t
  misc_feature (1119)..(1119): n is a, c, g, or t
  misc_feature (1126)..(1126): n is a, c, g, or t
  misc_feature (1130)..(1130): n is a, c, g, or t
  misc_feature (1134)..(1134): n is a, c, g, or t
  misc_feature (1153)..(1153): n is a, c, g, or t
  misc_feature (1167)..(1167): n is a, c, g, or t
  misc_feature (1189)..(1189): n is a, c, g, or t
  misc_feature (1193)..(1193): n is a, c, g, or t
  misc_feature (1202)..(1202): n is a, c, g, or t
  misc_feature (1207)..(1207): n is a, c, g, or t
  misc_feature (1209)..(1210): n is a, c, g, or t
  misc_feature (1217)..(1218): n is a, c, g, or t
  misc_feature (1221)..(1221): n is a, c, g, or t
  misc_feature (1233)..(1233): n is a, c, g, or t
  misc_feature (1240)..(1240): n is a, c, g, or t
  misc_feature (1243)..(1243): n is a, c, g, or t
  misc_feature (1247)..(1247): n is a, c, g, or t
  misc_feature (1251)..(1251): n is a, c, g, or t
  misc_feature (1262)..(1262): n is a, c, g, or t
  misc_feature (1266)..(1266): n is a, c, g, or t
  misc_feature (1271)..(1271): n is a, c, g, or t
  misc_feature (1292)..(1292): n is a, c, g, or t
  misc_feature (1295)..(1295): n is a, c, g, or t
  misc_feature (1297)..(1297): n is a, c, g, or t
  misc_feature (1300)..(1300): n is a, c, g, or t
  misc_feature (1308)..(1308): n is a, c, g, or t
  misc_feature (1314)..(1314): n is a, c, g, or t
  misc_feature (1326)..(1326): n is a, c, g, or t
  misc_feature (1331)..(1331): n is a, c, g, or t
  misc_feature (1343)..(1343): n is a, c, g, or t
  misc_feature (1348)..(1349): n is a, c, g, or t
  misc_feature (1351)..(1351): n is a, c, g, or t
  misc_feature (1355)..(1356): n is a, c, g, or t
  misc_feature (1359)..(1359): n is a, c, g, or t
  misc_feature (1362)..(1362): n is a, c, g, or t
  misc_feature (1364)..(1364): n is a, c, g, or t
  misc_feature (1366)..(1366): n is a, c, g, or t
  misc_feature (1372)..(1372): n is a, c, g, or t
  misc_feature (1376)..(1376): n is a, c, g, or t
  misc_feature (1383)..(1383): n is a, c, g, or t
  misc_feature (1386)..(1386): n is a, c, g, or t
  misc_feature (1394)..(1395): n is a, c, g, or t
  misc_feature (1397)..(1397): n is a, c, g, or t
  misc_feature (1400)..(1401): n is a, c, g, or t
  misc_feature (1404)..(1404): n is a, c, g, or t
  misc_feature (1410)..(1411): n is a, c, g, or t
  misc_feature (1415)..(1415): n is a, c, g, or t
  misc_feature (1425)..(1425): n is a, c, g, or t
  misc_feature (1428)..(1428): n is a, c, g, or t
aatagagaaattactatgagaggatcgcatcaccatcaccatcacggatcctatttaggtgacactatagaatcgtcgacccacgcgtccgcccacgcgtccgcccacgcgtccgcggacgcgtgggctgcccctgtcccgtttgactttacacataaaaaacaatcaggtggtgcaggccagtatggaaaagtaataggtgtcctggagcctctggacccagaggactacactaaattggaattttcagatgaaacattcggatcaaatattccaaagcagtttgtgcctgctgtagaaaaggggtttttagatgcctgcgagaagggccctctttctggtcacaagctctctgggctccggtttgtcctgcaagatggagcacaccacatggttgattctaatgaaatctctttcatccgagcaggagaaggtgctcttaaacaagccttggcaaatgcaacattatgtattcttgaacctattatggctgtggaagttgtagctccaaatgaatttcagggacaagtaattgcaggaattaaccgacgccatggggtaatcactgggcaagatggagttgaggactattttacactgtatgcagatgtccctctaaatgatatgtttggttattccactgaacttaggtcatgcacagagggaaagggagaatacacaatggagtatagcaggtatcagccatgtttaccatccacacaagaagacgtcattaataagtatttggaagctacaggtcaacttcctgttaaaaaaggaaaagccaagaactaactttgccttactgtgagttgactgactctaattgaatctgcgtggttttgaacttttgatggattccagtggaataaattcnnggctgctgaaacaanaaantcttgagcccaggaaagcggggctcctttctttncttcaaaanaanncctttctttgttcanaatttcaggancttccgttnatantccaaagggaaattccaatgtcccanncncnnactccnaattgnattgggttttanaggttaattgaaaaacccnccaanaaaaanaaaattaatnncngaaaaattgtttnaaaattttaagggggaaaaaaaanaaatttncacntttnacctttttaacccttaaanggatggtccatttnccaaatttttgtcccaaaaaantttncaccttaanaaaancnnaaaaaannccnaagaaaaccccnaactttnccncctncctnctttgtataangggntttanaaaaaaaaaattgttttgganatntnttncccggcanaaattnggttaacccaanacctnttttttttcgcnaaaannanaggnnccnatncngncacttntggnaggcaanggncctttttnnanaanntcncaattnncaangttttaactnccn

SEQ ID NO: 950 - DNA, 1365 bp, Homo Sapiens
  misc_feature (922)..(922): n is a, c, g, or t
  misc_feature (927)..(927): n is a, c, g, or t
  misc_feature (943)..(943): n is a, c, g, or t
  misc_feature (945)..(945): n is a, c, g, or t
  misc_feature (952)..(952): n is a, c, g, or t
  misc_feature (955)..(955): n is a, c, g, or t
  misc_feature (987)..(987): n is a, c, g, or t
  misc_feature (1011)..(1011): n is a, c, g, or t
  misc_feature (1019)..(1019): n is a, c, g, or t
  misc_feature (1022)..(1022): n is a, c, g, or t
  misc_feature (1026)..(1026): n is a, c, g, or t
  misc_feature (1030)..(1030): n is a, c, g, or t
  misc_feature (1033)..(1033): n is a, c, g, or t
  misc_feature (1050)..(1050): n is a, c, g, or t
  misc_feature (1052)..(1052): n is a, c, g, or t
  misc_feature (1060)..(1060): n is a, c, g, or t
  misc_feature (1070)..(1070): n is a, c, g, or t
  misc_feature (1072)..(1072): n is a, c, g, or t
  misc_feature (1075)..(1075): n is a, c, g, or t
  misc_feature (1085)..(1086): n is a, c, g, or t
  misc_feature (1095)..(1095): n is a, c, g, or t
  misc_feature (1111)..(1111): n is a, c, g, or t
  misc_feature (1116)..(1116): n is a, c, g, or t
  misc_feature (1118)..(1119): n is a, c, g, or t
  misc_feature (1122)..(1122): n is a, c, g, or t
  misc_feature (1126)..(1126): n is a, c, g, or t
  misc_feature (1137)..(1138): n is a, c, g, or t
  misc_feature (1141)..(1141): n is a, c, g, or t
  misc_feature (1146)..(1147): n is a, c, g, or t
  misc_feature (1149)..(1149): n is a, c, g, or t
  misc_feature (1152)..(1152): n is a, c, g, or t
  misc_feature (1159)..(1159): n is a, c, g, or t
  misc_feature (1162)..(1162): n is a, c, g, or t
  misc_feature (1172)..(1172): n is a, c, g, or t
  misc_feature (1188)..(1188): n is a, c, g, or t
  misc_feature (1191)..(1191): n is a, c, g, or t
  misc_feature (1193)..(1193): n is a, c, g, or t
  misc_feature (1195)..(1196): n is a, c, g, or t
  misc_feature (1203)..(1203): n is a, c, g, or t
  misc_feature (1205)..(1205): n is a, c, g, or t
  misc_feature (1213)..(1213): n is a, c, g, or t
  misc_feature (1215)..(1216): n is a, c, g, or t
  misc_feature (1218)..(1219): n is a, c, g, or t
  misc_feature (1221)..(1221): n is a, c, g, or t
  misc_feature (1224)..(1227): n is a, c, g, or t
  misc_feature (1232)..(1232): n is a, c, g, or t
  misc_feature (1238)..(1240): n is a, c, g, or t
  misc_feature (1246)..(1247): n is a, c, g, or t
  misc_feature (1250)..(1250): n is a, c, g, or t
  misc_feature (1253)..(1253): n is a, c, g, or t
  misc_feature (1256)..(1256): n is a, c, g, or t
  misc_feature (1258)..(1264): n is a, c, g, or t
  misc_feature (1266)..(1266): n is a, c, g, or t
  misc_feature (1273)..(1273): n is a, c, g, or t
  misc_feature (1277)..(1277): n is a, c, g, or t
  misc_feature (1280)..(1280): n is a, c, g, or t
  misc_feature (1282)..(1282): n is a, c, g, or t
  misc_feature (1285)..(1285): n is a, c, g, or t
  misc_feature (1288)..(1289): n is a, c, g, or t
  misc_feature (1294)..(1295): n is a, c, g, or t
  misc_feature (1298)..(1301): n is a, c, g, or t
  misc_feature (1305)..(1305): n is a, c, g, or t
  misc_feature (1312)..(1312): n is a, c, g, or t
  misc_feature (1315)..(1315): n is a, c, g, or t
  misc_feature (1317)..(1318): n is a, c, g, or t
  misc_feature (1321)..(1324): n is a, c, g, or t
  misc_feature (1329)..(1332): n is a, c, g, or t
  misc_feature (1334)..(1334): n is a, c, g, or t
  misc_feature (1338)..(1338): n is a, c, g, or t
  misc_feature (1340)..(1344): n is a, c, g, or t
  misc_feature (1346)..(1347): n is a, c, g, or t
  misc_feature (1350)..(1353): n is a, c, g, or t
  misc_feature (1355)..(1355): n is a, c, g, or t
  misc_feature (1357)..(1358): n is a, c, g, or t
  misc_feature (1360)..(1360): n is a, c, g, or t
  misc_feature (1365)..(1365): n is a, c, g, or t
atagagaaattactatgagaggatcgcatcaccatcaccatcacggatcctatttaggtgacactatagaatcgtcgacccacgcgtccggcacggagctcaaccaccttggctaccagtttgtgcagagagtgtttgagaagcacgaccaggaccgcgacggcgccctctcgcccgtggagctgcaaagccttttcagtgtgttcccagcagcgccctggggccccgagctcccacgcacagtccgcacagaggccggccggttgcccctgcacggatacctctgccagtggaccctggtgacctacctggacgtccggagctgccttggacacctaggctacctgggctaccccaccctctgtgagcaggaccaggcccatgccatcacagtcactcgtgagaagaggctggaccaggagaagggacagacgcagcggagcgtcctcctgtgcaaggtggtaggggcccgtggagtgggcaagtctgccttcctgcaggcctttctcggccgcggcctggggcaccaggacacgagggagcagcctcccggctacgccatcgacacggtgcaggtcaatggacaggagaagtacttgatcctctgtgaggtgggcacagatggtctgctggccacatcgctggacgccacctgtgacgttgcctgcttgatgtttgatggcagtgacccaaagtcctttgcacattgtgccagcgtctacaagcaccattacatggacgggcagaccccctgcctctttgtctcctccaaggccgacctgcccgaaggtgtcgcggtgtctggcccatcaccggccgagttttgccgcaagcaccggctacccgctcccgtgccgttctcctgtgctggcccagccgagcccagcaccaccatcttcacccagctcgccacatggccgcnttccnacatttggtcacgcananctgcatnccntcttccttttggctccgggggctgctgggggnttgtcggggcccccctggccccantccttaanttntcantttnaangggtcctggtgaaaaancnagtgaagncccttggtancnaanccccctcccnnaactgggtntgcctccttgctgggnctttncnnggnaaanaaaattggggnngangccanntnccnctccggnaanccttttcccnggaatttttttttttnaangnanncaatttnanggggcctnanntnncnagnnnncctgntcctgnnnaaaccnnggnggnccngnnnnnnngnttaaaanaaantcnantgnggnnccccnnttnnnnaatnccccccnggnannttnnnntgggnnnngnaaanannnnngnnaannnnancnnancaaan

SEQ ID NO: 951 - DNA, 1554 bp, Homo Sapiens
  misc_feature (241)..(241): n is a, c, g, or t
  misc_feature (267)..(267): n is a, c, g, or t
  misc_feature (278)..(278): n is a, c, g, or t
  misc_feature (285)..(285): n is a, c, g, or t
  misc_feature (292)..(292): n is a, c, g, or t
  misc_feature (297)..(297): n is a, c, g, or t
  misc_feature (316)..(317): n is a, c, g, or t
  misc_feature (321)..(321): n is a, c, g, or t
  misc_feature (326)..(326): n is a, c, g, or t
  misc_feature (330)..(330): n is a, c, g, or t
  misc_feature (334)..(334): n is a, c, g, or t
  misc_feature (342)..(343): n is a, c, g, or t
  misc_feature (346)..(346): n is a, c, g, or t
  misc_feature (354)..(355): n is a, c, g, or t
  misc_feature (357)..(358): n is a, c, g, or t
  misc_feature (362)..(363): n is a, c, g, or t
  misc_feature (368)..(368): n is a, c, g, or t
  misc_feature (371)..(371): n is a, c, g, or t
  misc_feature (374)..(374): n is a, c, g, or t
  misc_feature (377)..(377): n is a, c, g, or t
  misc_feature (384)..(384): n is a, c, g, or t
  misc_feature (388)..(388): n is a, c, g, or t
  misc_feature (390)..(390): n is a, c, g, or t
  misc_feature (392)..(392): n is a, c, g, or t
  misc_feature (400)..(401): n is a, c, g, or t
  misc_feature (406)..(409): n is a, c, g, or t
  misc_feature (423)..(423): n is a, c, g, or t
  misc_feature (425)..(425): n is a, c, g, or t
  misc_feature (432)..(432): n is a, c, g, or t
  misc_feature (441)..(445): n is a, c, g, or t
  misc_feature (449)..(449): n is a, c, g, or t
  misc_feature (451)..(451): n is a, c, g, or t
  misc_feature (456)..(457): n is a, c, g, or t
  misc_feature (461)..(461): n is a, c, g, or t
  misc_feature (463)..(463): n is a, c, g, or t
  misc_feature (466)..(466): n is a, c, g, or t
  misc_feature (471)..(471): n is a, c, g, or t
  misc_feature (473)..(474): n is a, c, g, or t
  misc_feature (481)..(481): n is a, c, g, or t
  misc_feature (483)..(483): n is a, c, g, or t
  misc_feature (487)..(487): n is a, c, g, or t
  misc_feature (491)..(491): n is a, c, g, or t
  misc_feature (498)..(498): n is a, c, g, or t
  misc_feature (502)..(505): n is a, c, g, or t
  misc_feature (513)..(513): n is a, c, g, or t
  misc_feature (515)..(515): n is a, c, g, or t
  misc_feature (520)..(521): n is a, c, g, or t
  misc_feature (523)..(523): n is a, c, g, or t
  misc_feature (528)..(528): n is a, c, g, or t
  misc_feature (531)..(531): n is a, c, g, or t
  misc_feature (538)..(538): n is a, c, g, or t
  misc_feature (540)..(541): n is a, c, g, or t
  misc_feature (543)..(543): n is a, c, g, or t
  misc_feature (547)..(547): n is a, c, g, or t
  misc_feature (555)..(555): n is a, c, g, or t
  misc_feature (557)..(557): n is a, c, g, or t
  misc_feature (564)..(564): n is a, c, g, or t
  misc_feature (575)..(575): n is a, c, g, or t
  misc_feature (578)..(578): n is a, c, g, or t
  misc_feature (581)..(581): n is a, c, g, or t
  misc_feature (584)..(584): n is a, c, g, or t
  misc_feature (588)..(588): n is a, c, g, or t
  misc_feature (592)..(592): n is a, c, g, or t
  misc_feature (596)..(596): n is a, c, g, or t
  misc_feature (598)..(599): n is a, c, g, or t
  misc_feature (601)..(601): n is a, c, g, or t
  misc_feature (610)..(611): n is a, c, g, or t
  misc_feature (614)..(614): n is a, c, g, or t
  misc_feature (617)..(617): n is a, c, g, or t
  misc_feature (622)..(624): n is a, c, g, or t
  misc_feature (626)..(626): n is a, c, g, or t
  misc_feature (629)..(629): n is a, c, g, or t
  misc_feature (637)..(638): n is a, c, g, or t
  misc_feature (642)..(643): n is a, c, g, or t
  misc_feature (650)..(650): n is a, c, g, or t
  misc_feature (653)..(654): n is a, c, g, or t
  misc_feature (661)..(661): n is a, c, g, or t
  misc_feature (664)..(664): n is a, c, g, or t
  misc_feature (667)..(667): n is a, c, g, or t
  misc_feature (674)..(674): n is a, c, g, or t
  misc_feature (677)..(679): n is a, c, g, or t
  misc_feature (682)..(682): n is a, c, g, or t
  misc_feature (684)..(684): n is a, c, g, or t
  misc_feature (688)..(688): n is a, c, g, or t
  misc_feature (691)..(694): n is a, c, g, or t
  misc_feature (700)..(700): n is a, c, g, or t
  misc_feature (702)..(702): n is a, c, g, or t
  misc_feature (713)..(714): n is a, c, g, or t
  misc_feature (718)..(718): n is a, c, g, or t
  misc_feature (721)..(723): n is a, c, g, or t
  misc_feature (727)..(727): n is a, c, g, or t
  misc_feature (736)..(737): n is a, c, g, or t
  misc_feature (743)..(743): n is a, c, g, or t
  misc_feature (748)..(752): n is a, c, g, or t
  misc_feature (758)..(759): n is a, c, g, or t
  misc_feature (763)..(764): n is a, c, g, or t
  misc_feature (766)..(768): n is a, c, g, or t
  misc_feature (770)..(772): n is a, c, g, or t
  misc_feature (774)..(774): n is a, c, g, or t
  misc_feature (776)..(777): n is a, c, g, or t
  misc_feature (787)..(790): n is a, c, g, or t
  misc_feature (793)..(794): n is a, c, g, or t
  misc_feature (801)..(804): n is a, c, g, or t
  misc_feature (806)..(807): n is a, c, g, or t
  misc_feature (810)..(812): n is a, c, g, or t
  misc_feature (814)..(817): n is a, c, g, or t
  misc_feature (821)..(822): n is a, c, g, or t
  misc_feature (827)..(827): n is a, c, g, or t
  misc_feature (829)..(829): n is a, c, g, or t
  misc_feature (831)..(831): n is a, c, g, or t
  misc_feature (833)..(833): n is a, c, g, or t
  misc_feature (840)..(843): n is a, c, g, or t
  misc_feature (848)..(849): n is a, c, g, or t
  misc_feature (851)..(852): n is a, c, g, or t
  misc_feature (856)..(856): n is a, c, g, or t
  misc_feature (860)..(860): n is a, c, g, or t
  misc_feature (871)..(871): n is a, c, g, or t
  misc_feature (875)..(875): n is a, c, g, or t
  misc_feature (879)..(879): n is a, c, g, or t
  misc_feature (881)..(881): n is a, c, g, or t
  misc_feature (885)..(885): n is a, c, g, or t
  misc_feature (887)..(887): n is a, c, g, or t
  misc_feature (889)..(889): n is a, c, g, or t
  misc_feature (894)..(895): n is a, c, g, or t
  misc_feature (903)..(903): n is a, c, g, or t
  misc_feature (907)..(908): n is a, c, g, or t
  misc_feature (914)..(914): n is a, c, g, or t
  misc_feature (916)..(916): n is a, c, g, or t
  misc_feature (921)..(921): n is a, c, g, or t
  misc_feature (923)..(924): n is a, c, g, or t
  misc_feature (927)..(927): n is a, c, g, or t
  misc_feature (929)..(929): n is a, c, g, or t
  misc_feature (937)..(938): n is a, c, g, or t
  misc_feature (941)..(943): n is a, c, g, or t
  misc_feature (946)..(948): n is a, c, g, or t
  misc_feature (953)..(953): n is a, c, g, or t
  misc_feature (961)..(961): n is a, c, g, or t
  misc_feature (966)..(967): n is a, c, g, or t
  misc_feature (972)..(972): n is a, c, g, or t
  misc_feature (976)..(976): n is a, c, g, or t
  misc_feature (986)..(986): n is a, c, g, or t
  misc_feature (994)..(994): n is a, c, g, or t
  misc_feature (1002)..(1002): n is a, c, g, or t
  misc_feature (1009)..(1009): n is a, c, g, or t
  misc_feature (1011)..(1011): n is a, c, g, or t
  misc_feature (1014)..(1016): n is a, c, g, or t
  misc_feature (1018)..(1018): n is a, c, g, or t
  misc_feature (1020)..(1020): n is a, c, g, or t
  misc_feature (1025)..(1029): n is a, c, g, or t
  misc_feature (1034)..(1035): n is a, c, g, or t
  misc_feature (1037)..(1037): n is a, c, g, or t
  misc_feature (1040)..(1040): n is a, c, g, or t
  misc_feature (1043)..(1043): n is a, c, g, or t
  misc_feature (1048)..(1048): n is a, c, g, or t
  misc_feature (1050)..(1051): n is a, c, g, or t
  misc_feature (1053)..(1053): n is a, c, g, or t
  misc_feature (1056)..(1056): n is a, c, g, or t
  misc_feature (1059)..(1060): n is a, c, g, or t
  misc_feature (1063)..(1063): n is a, c, g, or t
  misc_feature (1068)..(1068): n is a, c, g, or t
  misc_feature (1073)..(1073): n is a, c, g, or t
  misc_feature (1077)..(1077): n is a, c, g, or t
  misc_feature (1082)..(1082): n is a, c, g, or t
  misc_feature (1087)..(1087): n is a, c, g, or t
  misc_feature (1089)..(1089): n is a, c, g, or t
  misc_feature (1091)..(1091): n is a, c, g, or t
  misc_feature (1095)..(1095): n is a, c, g, or t
  misc_feature (1100)..(1100): n is a, c, g, or t
  misc_feature (1102)..(1104): n is a, c, g, or t
  misc_feature (1108)..(1108): n is a, c, g, or t
  misc_feature (1111)..(1111): n is a, c, g, or t
  misc_feature (1120)..(1120): n is a, c, g, or t
  misc_feature (1123)..(1123): n is a, c, g, or t
  misc_feature (1126)..(1126): n is a, c, g, or t
  misc_feature (1129)..(1129): n is a, c, g, or t
  misc_feature (1132)..(1132): n is a, c, g, or t
  misc_feature (1139)..(1141): n is a, c, g, or t
  misc_feature (1147)..(1147): n is a, c, g, or t
  misc_feature (1150)..(1150): n is a, c, g, or t
  misc_feature (1152)..(1152): n is a, c, g, or t
  misc_feature (1155)..(1155): n is a, c, g, or t
  misc_feature (1158)..(1158): n is a, c, g, or t
  misc_feature (1163)..(1163): n is a, c, g, or t
  misc_feature (1168)..(1169): n is a, c, g, or t
  misc_feature (1172)..(1172): n is a, c, g, or t
  misc_feature (1176)..(1177): n is a, c, g, or t
  misc_feature (1179)..(1180): n is a, c, g, or t
  misc_feature (1184)..(1184): n is a, c, g, or t
  misc_feature (1190)..(1190): n is a, c, g, or t
  misc_feature (1197)..(1197): n is a, c, g, or t
  misc_feature (1203)..(1203): n is a, c, g, or t
  misc_feature (1205)..(1205): n is a, c, g, or t
  misc_feature (1209)..(1209): n is a, c, g, or t
  misc_feature (1223)..(1223): n is a, c, g, or t
  misc_feature (1226)..(1226): n is a, c, g, or t
  misc_feature (1237)..(1237): n is a, c, g, or t
  misc_feature (1247)..(1248): n is a, c, g, or t
  misc_feature (1263)..(1263): n is a, c, g, or t
  misc_feature (1269)..(1269): n is a, c, g, or t
  misc_feature (1277)..(1277): n is a, c, g, or t
  misc_feature (1286)..(1286): n is a, c, g, or t
  misc_feature (1289)..(1289): n is a, c, g, or t
  misc_feature (1292)..(1292): n is a, c, g, or t
  misc_feature (1297)..(1298): n is a, c, g, or t
  misc_feature (1305)..(1305): n is a, c, g, or t
  misc_feature (1320)..(1322): n is a, c, g, or t
  misc_feature (1325)..(1326): n is a, c, g, or t
  misc_feature (1328)..(1328): n is a, c, g, or t
  misc_feature (1331)..(1332): n is a, c, g, or t
  misc_feature (1339)..(1340): n is a, c, g, or t
  misc_feature (1346)..(1346): n is a, c, g, or t
  misc_feature (1350)..(1350): n is a, c, g, or t
  misc_feature (1357)..(1357): n is a, c, g, or t
  misc_feature (1400)..(1400): n is a, c, g, or t
  misc_feature (1402)..(1403): n is a, c, g, or t
  misc_feature (1407)..(1407): n is a, c, g, or t
  misc_feature (1409)..(1409): n is a, c, g, or t
  misc_feature (1417)..(1417): n is a, c, g, or t
  misc_feature (1421)..(1423): n is a, c, g, or t
  misc_feature (1430)..(1431): n is a, c, g, or t
  misc_feature (1435)..(1435): n is a, c, g, or t
  misc_feature (1448)..(1449): n is a, c, g, or t
  misc_feature (1452)..(1452): n is a, c, g, or t
  misc_feature (1454)..(1454): n is a, c, g, or t
  misc_feature (1456)..(1458): n is a, c, g, or t
  misc_feature (1460)..(1460): n is a, c, g, or t
  misc_feature (1464)..(1464): n is a, c, g, or t
  misc_feature (1469)..(1469): n is a, c, g, or t
  misc_feature (1478)..(1479): n is a, c, g, or t
  misc_feature (1481)..(1481): n is a, c, g, or t
  misc_feature (1492)..(1492): n is a, c, g, or t
  misc_feature (1498)..(1498): n is a, c, g, or t
  misc_feature (1504)..(1504): n is a, c, g, or t
  misc_feature (1506)..(1506): n is a, c, g, or t
  misc_feature (1513)..(1516): n is a, c, g, or t
  misc_feature (1519)..(1519): n is a, c, g, or t
  misc_feature (1525)..(1526): n is a, c, g, or t
  misc_feature (1528)..(1528): n is a, c, g, or t
  misc_feature (1533)..(1533): n is a, c, g, or t
  misc_feature (1536)..(1536): n is a, c, g, or t
  misc_feature (1544)..(1544): n is a, c, g, or t
  misc_feature (1546)..(1546): n is a, c, g, or t
  misc_feature (1548)..(1548): n is a, c, g, or t
  misc_feature (1553)..(1553): n is a, c, g, or t
tagagagaattactatgagaggatcgcatcaccatcaccatcacggatcctatttaggtgacactatagaatcgtcgacccacgcgtccggcagtgtgggcatcccagcactgaggttctgcccgggagaagccgacccctcccgcaatgcccgccccgccgtgcgcctcctgccatgctgcacgcaccgccctccgccgtccgctctcgggccaagcgctgtgcggtgcctgcttctgcnccgccttcgaggccgaagtgctgcanacggtgctcgncggccgnctgctgncgccnggcgcggtggtggacatgnncgcntcggncggnaagnactccaanntgntggcgcanntnntgtnngcganggngancangcctggnaatntnantgcaactnnggggnnnnaatgaaggcatcantnactaacnaaatgctannnnncgcntnccgtnnatgnanagnaaaancnngttgtananctgncaantgcgaangtgnnnnaacagtancnctttnngnactgnttntatatananntnaagnatcaaagnanaaccaanattctagcctnatncantantgantccnctancnngngaaagcatnnaanaanactannntnatnaataattnnttanntatcaantanntcatcanctnaanaagaatnaannngtnancaanggnnnnaacganantaaaaaaaaanntttnccnnnttanaattaaatnnaaactntctannnnnggaaanncatnnannnannntngnnaattaattgnnnntanntcaatannnnannaannnannnnagannctcantntntntcaatannnncaaanntnnttantatnaaataagaaanaatntgancnatanananttttnncaaaaganatcnnaacatntnttttnannatntnaatacatnntannnaannnaaganatttatanacgcnnatacntcanaatattttantaaaacanaaaaaaanaaaatanancannntnantattnnnnnaaaannanaanaantcaantnnanttnccnntanaattnaaaantatnaaaantatcncnantatnttaanannnactnttnccacaaatnaanatncanatntataaannncatttnaantnatntanaaatntaacnnggnaaannannaaanaatatnatcaaanatatantntcanattataaacaacanacntaacaaagtcnttttaaatanncaaaaaaaaaaaacncaaaanaaacactncttaaaatntanctntcaannataattnaagtattaataattnnntannanaannttatttnnatattnactnacaaaanaaataaattctatttatttcttatatataaagatatattattntnnatantncacactanatannncatcaannacanaaaaattagatannttncngnnntntaanatacntattcattnngnatataataatnaataanaactgncncctacannnncantaaccnntnctacntangagactanancntatcna

SEQ ID NO: 952 - DNA, 1381 bp, Homo Sapiens
  misc_feature (750)..(750): n is a, c, g, or t
  misc_feature (857)..(857): n is a, c, g, or t
  misc_feature (932)..(932): n is a, c, g, or t
  misc_feature (938)..(938): n is a, c, g, or t
  misc_feature (943)..(943): n is a, c, g, or t
  misc_feature (946)..(946): n is a, c, g, or t
  misc_feature (985)..(985): n is a, c, g, or t
  misc_feature (1000)..(1000): n is a, c, g, or t
  misc_feature (1003)..(1003): n is a, c, g, or t
  misc_feature (1011)..(1011): n is a, c, g, or t
  misc_feature (1018)..(1019): n is a, c, g, or t
  misc_feature (1031)..(1032): n is a, c, g, or t
  misc_feature (1040)..(1040): n is a, c, g, or t
  misc_feature (1045)..(1045): n is a, c, g, or t
  misc_feature (1047)..(1047): n is a, c, g, or t
  misc_feature (1055)..(1056): n is a, c, g, or t
  misc_feature (1058)..(1058): n is a, c, g, or t
  misc_feature (1070)..(1070): n is a, c, g, or t
  misc_feature (1073)..(1073): n is a, c, g, or t
  misc_feature (1075)..(1075): n is a, c, g, or t
  misc_feature (1078)..(1078): n is a, c, g, or t
  misc_feature (1103)..(1103): n is a, c, g, or t
  misc_feature (1118)..(1118): n is a, c, g, or t
  misc_feature (1120)..(1121): n is a, c, g, or t
  misc_feature (1125)..(1125): n is a, c, g, or t
  misc_feature (1129)..(1129): n is a, c, g, or t
  misc_feature (1135)..(1136): n is a, c, g, or t
  misc_feature (1139)..(1139): n is a, c, g, or t
  misc_feature (1149)..(1149): n is a, c, g, or t
  misc_feature (1151)..(1151): n is a, c, g, or t
  misc_feature (1157)..(1157): n is a, c, g, or t
  misc_feature (1159)..(1159): n is a, c, g, or t
  misc_feature (1172)..(1172): n is a, c, g, or t
  misc_feature (1174)..(1174): n is a, c, g, or t
  misc_feature (1176)..(1176): n is a, c, g, or t
  misc_feature (1178)..(1178): n is a, c, g, or t
  misc_feature (1182)..(1182): n is a, c, g, or t
  misc_feature (1190)..(1190): n is a, c, g, or t
  misc_feature (1203)..(1203): n is a, c, g, or t
  misc_feature (1214)..(1214): n is a, c, g, or t
  misc_feature (1223)..(1223): n is a, c, g, or t
  misc_feature (1225)..(1225): n is a, c, g, or t
  misc_feature (1228)..(1228): n is a, c, g, or t
  misc_feature (1230)..(1230): n is a, c, g, or t
  misc_feature (1233)..(1233): n is a, c, g, or t
  misc_feature (1236)..(1236): n is a, c, g, or t
  misc_feature (1238)..(1238): n is a, c, g, or t
  misc_feature (1240)..(1241): n is a, c, g, or t
  misc_feature (1244)..(1245): n is a, c, g, or t
  misc_feature (1251)..(1251): n is a, c, g, or t
  misc_feature (1254)..(1254): n is a, c, g, or t
  misc_feature (1256)..(1256): n is a, c, g, or t
  misc_feature (1259)..(1259): n is a, c, g, or t
  misc_feature (1267)..(1268): n is a, c, g, or t
  misc_feature (1271)..(1271): n is a, c, g, or t
  misc_feature (1283)..(1283): n is a, c, g, or t
  misc_feature (1285)..(1285): n is a, c, g, or t
  misc_feature (1296)..(1296): n is a, c, g, or t
  misc_feature (1300)..(1300): n is a, c, g, or t
  misc_feature (1305)..(1306): n is a, c, g, or t
  misc_feature (1317)..(1318): n is a, c, g, or t
  misc_feature (1320)..(1322): n is a, c, g, or t
  misc_feature (1324)..(1324): n is a, c, g, or t
  misc_feature (1326)..(1326): n is a, c, g, or t
  misc_feature (1328)..(1328): n is a, c, g, or t
  misc_feature (1330)..(1330): n is a, c, g, or t
  misc_feature (1336)..(1338): n is a, c, g, or t
  misc_feature (1340)..(1343): n is a, c, g, or t
  misc_feature (1345)..(1345): n is a, c, g, or t
  misc_feature (1348)..(1351): n is a, c, g, or t
  misc_feature (1353)..(1355): n is a, c, g, or t
  misc_feature (1358)..(1360): n is a, c, g, or t
  misc_feature (1362)..(1364): n is a, c, g, or t
  misc_feature (1371)..(1373): n is a, c, g, or t
  misc_feature (1376)..(1377): n is a, c, g, or t
  misc_feature (1379)..(1380): n is a, c, g, or t
tagagaaattactatgagaggatcgcatcaccatcaccatcacggatcctatttaggtgacactatagaatcgtcgacccacgcgtccggggagccggatcgccgacctgagcgggaggcggcggtggcggccatggcggcagatggagagcgttccccgctgctgtctgagcccatcgacggtggcgcgggcggcaacggtttagtggggcccggcgggagtggggctgggcccgggggaggcctgaccccctccgcaccaccgtacggagccgcatttcccccgtttcccgaggggcatccagccgtgttgcctggggaggacccacccccctattcacccttaactagcccggacagtgggagtgcccctatgatcacctgccgagtctgccaatctctcatcaacgtggaaggcaagatgcatcagcatgtagtcaaatgtggtgtctgcaatgaagccaccccaatcaagaatgcacccccagggaaaaaatatgttcgatgcccctgtaactgtctccttatctgcaaagtgacatcccaacggattgcatgccctcggccctactgcaaaagaatcatcaacctggggcctgtgcatcccggacctctgagtccagaaccccaacccatgggtgtcagggttatctgtggacattgcaagaatacttttctgtggacagagttcacagaccgcactttggcacgttgtcctcactgcaggaaagtgtcatctattgggcgcanatacccacgtaagagatgtatctgctgcttcttgcttggcttgcttttggcagtcactgccactggccttgcctttggcacatggaagcatgcacggcgatatggangcatctatgcagcctgggcatttgtcatcctgttggctgtgctgtgtttgggcccgggctctttattgggcctgnatgaangtcanccnccctgtccaaaaattctcttgaacctgataaccacaaantgtgcctggcccctnccntggtgggnaagtgannctacaaaggaanntggggtanttaangnttccgggnntntaaaaagaaacnaananctnccttctttttcctgggaaaagtagnaagaaaccagccctncnnttantttngaaggnnaanaaaaacctgntnaacatntnttttctccaaggntntntnttangtaaaaanaaaaatttccttnaaaatggcctnaaaaagttncnccntnttnttntntnnccnnaaaaanttntntcnttaatttnnggnaggggggggggnanccgggggttcncccnttttnnaaaaaaatttnngnnntnantncnaaaggnnngnnnnanaannnntnnnccnnntnnnggggggnnnccnntnna

SEQ ID NO: 953 - DNA, 1334 bp, Homo Sapiens
  misc_feature (894)..(894): n is a, c, g, or t
  misc_feature (906)..(906): n is a, c, g, or t
  misc_feature (926)..(926): n is a, c, g, or t
  misc_feature (930)..(930): n is a, c, g, or t
  misc_feature (932)..(932): n is a, c, g, or t
  misc_feature (941)..(941): n is a, c, g, or t
  misc_feature (958)..(958): n is a, c, g, or t
  misc_feature (984)..(984): n is a, c, g, or t
  misc_feature (989)..(989): n is a, c, g, or t
  misc_feature (991)..(991): n is a, c, g, or t
  misc_feature (1007)..(1007): n is a, c, g, or t
  misc_feature (1017)..(1017): n is a, c, g, or t
  misc_feature (1020)..(1021): n is a, c, g, or t
  misc_feature (1029)..(1029): n is a, c, g, or t
  misc_feature (1040)..(1040): n is a, c, g, or t
  misc_feature (1050)..(1050): n is a, c, g, or t
  misc_feature (1053)..(1054): n is a, c, g, or t
  misc_feature (1058)..(1058): n is a, c, g, or t
  misc_feature (1063)..(1063): n is a, c, g, or t
  misc_feature (1078)..(1078): n is a, c, g, or t
  misc_feature (1085)..(1085): n is a, c, g, or t
  misc_feature (1103)..(1103): n is a, c, g, or t
  misc_feature (1106)..(1106): n is a, c, g, or t
  misc_feature (1114)..(1114): n is a, c, g, or t
  misc_feature (1119)..(1119): n is a, c, g, or t
  misc_feature (1124)..(1124): n is a, c, g, or t
  misc_feature (1128)..(1128): n is a, c, g, or t
  misc_feature (1130)..(1130): n is a, c, g, or t
  misc_feature (1132)..(1132): n is a, c, g, or t
  misc_feature (1137)..(1137): n is a, c, g, or t
  misc_feature (1140)..(1140): n is a, c, g, or t
  misc_feature (1145)..(1145): n is a, c, g, or t
  misc_feature (1147)..(1147): n is a, c, g, or t
  misc_feature (1172)..(1172): n is a, c, g, or t
  misc_feature (1174)..(1174): n is a, c, g, or t
  misc_feature (1178)..(1178): n is a, c, g, or t
  misc_feature (1188)..(1188): n is a, c, g, or t
  misc_feature (1190)..(1190): n is a, c, g, or t
  misc_feature (1200)..(1203): n is a, c, g, or t
  misc_feature (1206)..(1207): n is a, c, g, or t
  misc_feature (1210)..(1210): n is a, c, g, or t
  misc_feature (1215)..(1215): n is a, c, g, or t
  misc_feature (1218)..(1218): n is a, c, g, or t
  misc_feature (1223)..(1223): n is a, c, g, or t
  misc_feature (1226)..(1226): n is a, c, g, or t
  misc_feature (1229)..(1231): n is a, c, g, or t
  misc_feature (1235)..(1235): n is a, c, g, or t
  misc_feature (1238)..(1238): n is a, c, g, or t
  misc_feature (1244)..(1244): n is a, c, g, or t
  misc_feature (1246)..(1246): n is a, c, g, or t
  misc_feature (1256)..(1256): n is a, c, g, or t
  misc_feature (1258)..(1259): n is a, c, g, or t
  misc_feature (1261)..(1261): n is a, c, g, or t
  misc_feature (1263)..(1264): n is a, c, g, or t
  misc_feature (1272)..(1272): n is a, c, g, or t
  misc_feature (1282)..(1282): n is a, c, g, or t
  misc_feature (1287)..(1287): n is a, c, g, or t
  misc_feature (1289)..(1289): n is a, c, g, or t
  misc_feature (1292)..(1293): n is a, c, g, or t
  misc_feature (1296)..(1297): n is a, c, g, or t
  misc_feature (1299)..(1299): n is a, c, g, or t
  misc_feature (1301)..(1301): n is a, c, g, or t
  misc_feature (1306)..(1306): n is a, c, g, or t
  misc_feature (1308)..(1317): n is a, c, g, or t
  misc_feature (1320)..(1322): n is a, c, g, or t
  misc_feature (1329)..(1330): n is a, c, g, or t
  misc_feature (1332)..(1332): n is a, c, g, or t
  misc_feature (1334)..(1334): n is a, c, g, or t
tagagaaaattactatgagaggatcgcatcaccatcaccatcacggatcctatttaggtgacactatagaatcgtcgacccacgcgtccgtccacatggagtacagctgcggcacagcggccatccggggcaccaaggagctgggggagggccagcacttctgggagatcaagatgacctctcccgtctacggcaccgacatgatggtgggcatcgggacgtcggatgtggacctggacaaataccgccacacgttctgcagcctgctgggcagggatgaggacagctggggcctctcctacacgggcctcctccaccacaagggcgacaagaccagcttctcgtcgcggttcggccagggctccatcattggcgtgcacctggacacctggcacggcacactcacctttttcaagaacaggaagtgtataggtgtggcagccaccaagctgcagaacaagagattctacccgatggtgtgctccacggcggcccggagcagcatgaaggtcacccgctcctgtgccagcgccacttccctccagtacctgtgctgccaccgcctgcgccagctgcggccagactcgggagacacgctggagggtctgccgctgccgccgggcctcaagcaggtgctacacaacaagctgggctgggtcctgagcatgagttgcagccgccgcaaggctccagtgtccgatccccaggcagcgacctccgcccaccccagcagtcgcgagcctcggccctgccagaggaagcgctgccgccggacctgactgacttcccagtggaactgccttcttgggctgggacagcccctttcctctgtcccttctttctctgtccccttcctttccagccacactccagggcggaattggatgaagcccnttccggaagganccatctcttgctcccaaggntggnanagtcctttntgtgggggctctaaggnccctctgctgctgtgctggggtgggnaaacngnctgccctgaaccccangtcttggggnagnntccaaganaaaaacctggntgaacccccnttnntttnccaanggccccggtttttcnaaattgntctgcatgctgtcacggntgncccccctnaaaantttanggangnanaatgnaanttatntnaaaaaaaaaaaaaaaaaaaaaaggngncccnccaaaggggncnataacttatnnnnaanntgnacccnttnaaaanccnaannncccnaancccctngnttttttaaancnngntnncccggggnttttttttgnaaaancnccnnttnngnanttttngnnnnnnnnnnaannnaaaaaanntntn

SEQ ID NO: 954 - DNA, 1548 bp, Homo Sapiens
  misc_feature (364)..(364): n is a, c, g, or t
  misc_feature (433)..(433): n is a, c, g, or t
  misc_feature (439)..(439): n is a, c, g, or t
  misc_feature (445)..(445): n is a, c, g, or t
  misc_feature (451)..(451): n is a, c, g, or t
  misc_feature (457)..(457): n is a, c, g, or t
  misc_feature (464)..(465): n is a, c, g, or t
  misc_feature (471)..(471): n is a, c, g, or t
  misc_feature (481)..(481): n is a, c, g, or t
  misc_feature (494)..(494): n is a, c, g, or t
  misc_feature (506)..(506): n is a, c, g, or t
  misc_feature (508)..(508): n is a, c, g, or t
  misc_feature (518)..(518): n is a, c, g, or t
  misc_feature (525)..(525): n is a, c, g, or t
  misc_feature (529)..(530): n is a, c, g, or t
  misc_feature (537)..(537): n is a, c, g, or t
  misc_feature (551)..(551): n is a, c, g, or t
  misc_feature (555)..(555): n is a, c, g, or t
  misc_feature (558)..(558): n is a, c, g, or t
  misc_feature (562)..(563): n is a, c, g, or t
  misc_feature (566)..(568): n is a, c, g, or t
  misc_feature (571)..(571): n is a, c, g, or t
  misc_feature (573)..(573): n is a, c, g, or t
  misc_feature (577)..(579): n is a, c, g, or t
  misc_feature (581)..(581): n is a, c, g, or t
  misc_feature (586)..(587): n is a, c, g, or t
  misc_feature (589)..(589): n is a, c, g, or t
  misc_feature (594)..(595): n is a, c, g, or t
  misc_feature (602)..(602): n is a, c, g, or t
  misc_feature (604)..(604): n is a, c, g, or t
  misc_feature (608)..(608): n is a, c, g, or t
  misc_feature (612)..(612): n is a, c, g, or t
  misc_feature (618)..(618): n is a, c, g, or t
  misc_feature (627)..(627): n is a, c, g, or t
  misc_feature (635)..(637): n is a, c, g, or t
  misc_feature (639)..(639): n is a, c, g, or t
  misc_feature (643)..(644): n is a, c, g, or t
  misc_feature (653)..(653): n is a, c, g, or t
  misc_feature (656)..(658): n is a, c, g, or t
  misc_feature (665)..(665): n is a, c, g, or t
  misc_feature (667)..(668): n is a, c, g, or t
  misc_feature (672)..(672): n is a, c, g, or t
  misc_feature (678)..(678): n is a, c, g, or t
  misc_feature (682)..(682): n is a, c, g, or t
  misc_feature (687)..(687): n is a, c, g, or t
  misc_feature (690)..(690): n is a, c, g, or t
  misc_feature (694)..(694): n is a, c, g, or t
  misc_feature (697)..(699): n is a, c, g, or t
  misc_feature (702)..(702): n is a, c, g, or t
  misc_feature (706)..(706): n is a, c, g, or t
  misc_feature (708)..(708): n is a, c, g, or t
  misc_feature (711)..(712): n is a, c, g, or t
  misc_feature (714)..(714): n is a, c, g, or t
  misc_feature (716)..(716): n is a, c, g, or t
  misc_feature (718)..(720): n is a, c, g, or t
  misc_feature (726)..(726): n is a, c, g, or t
  misc_feature (728)..(731): n is a, c, g, or t
  misc_feature (733)..(733): n is a, c, g, or t
  misc_feature (738)..(738): n is a, c, g, or t
  misc_feature (740)..(740): n is a, c, g, or t
  misc_feature (742)..(742): n is a, c, g, or t
  misc_feature (744)..(745): n is a, c, g, or t
  misc_feature (749)..(750): n is a, c, g, or t
  misc_feature (755)..(755): n is a, c, g, or t
  misc_feature (762)..(762): n is a, c, g, or t
  misc_feature (773)..(774): n is a, c, g, or t
  misc_feature (778)..(778): n is a, c, g, or t
  misc_feature (781)..(781): n is a, c, g, or t
  misc_feature (786)..(786): n is a, c, g, or t
  misc_feature (790)..(790): n is a, c, g, or t
  misc_feature (799)..(802): n is a, c, g, or t
  misc_feature (804)..(804): n is a, c, g, or t
  misc_feature (812)..(812): n is a, c, g, or t
  misc_feature (816)..(817): n is a, c, g, or t
  misc_feature (825)..(825): n is a, c, g, or t
  misc_feature (831)..(831): n is a, c, g, or t
  misc_feature (842)..(844): n is a, c, g, or t
  misc_feature (850)..(850): n is a, c, g, or t
  misc_feature (865)..(866): n is a, c, g, or t
  misc_feature (869)..(870): n is a, c, g, or t
  misc_feature (872)..(872): n is a, c, g, or t
  misc_feature (875)..(875): n is a, c, g, or t
  misc_feature (879)..(879): n is a, c, g, or t
  misc_feature (882)..(883): n is a, c, g, or t
  misc_feature (886)..(886): n is a, c, g, or t
  misc_feature (895)..(896): n is a, c, g, or t
  misc_feature (899)..(900): n is a, c, g, or t
  misc_feature (905)..(905): n is a, c, g, or t
  misc_feature (911)..(911): n is a, c, g, or t
  misc_feature (917)..(917): n is a, c, g, or t
  misc_feature (928)..(929): n is a, c, g, or t
  misc_feature (932)..(934): n is a, c, g, or t
  misc_feature (936)..(936): n is a, c, g, or t
  misc_feature (940)..(941): n is a, c, g, or t
  misc_feature (944)..(944): n is a, c, g, or t
  misc_feature (950)..(951): n is a, c, g, or t
  misc_feature (955)..(956): n is a, c, g, or t
  misc_feature (965)..(965): n is a, c, g, or t
  misc_feature (968)..(968): n is a, c, g, or t
  misc_feature (973)..(973): n is a, c, g, or t
  misc_feature (988)..(988): n is a, c, g, or t
  misc_feature (992)..(992): n is a, c, g, or t
  misc_feature (1002)..(1003): n is a, c, g, or t
  misc_feature (1012)..(1012): n is a, c, g, or t
  misc_feature (1015)..(1015): n is a, c, g, or t
  misc_feature (1019)..(1019): n is a, c, g, or t
  misc_feature (1024)..(1024): n is a, c, g, or t
  misc_feature (1027)..(1027): n is a, c, g, or t
  misc_feature (1030)..(1030): n is a, c, g, or t
  misc_feature (1035)..(1035): n is a, c, g, or t
  misc_feature (1042)..(1042): n is a, c, g, or t
  misc_feature (1048)..(1048): n is a, c, g, or t
  misc_feature (1063)..(1066): n is a, c, g, or t
  misc_feature (1071)..(1071): n is a, c, g, or t
  misc_feature (1073)..(1073): n is a, c, g, or t
  misc_feature (1076)..(1076): n is a, c, g, or t
  misc_feature (1081)..(1081): n is a, c, g, or t
  misc_feature (1084)..(1084): n is a, c, g, or t
  misc_feature (1093)..(1093): n is a, c, g, or t
  misc_feature (1096)..(1097): n is a, c, g, or t
  misc_feature (1099)..(1099): n is a, c, g, or t
  misc_feature (1105)..(1105): n is a, c, g, or t
  misc_feature (1107)..(1107): n is a, c, g, or t
  misc_feature (1109)..(1109): n is a, c, g, or t
  misc_feature (1119)..(1119): n is a, c, g, or t
  misc_feature (1122)..(1123): n is a, c, g, or t
  misc_feature (1125)..(1125): n is a, c, g, or t
  misc_feature (1127)..(1127): n is a, c, g, or t
  misc_feature (1131)..(1131): n is a, c, g, or t
  misc_feature (1134)..(1134): n is a, c, g, or t
  misc_feature (1136)..(1136): n is a, c, g, or t
  misc_feature (1139)..(1140): n is a, c, g, or t
  misc_feature (1144)..(1144): n is a, c, g, or t
  misc_feature (1146)..(1146): n is a, c, g, or t
  misc_feature (1151)..(1151): n is a, c, g, or t
  misc_feature (1155)..(1155): n is a, c, g, or t
  misc_feature (1157)..(1157): n is a, c, g, or t
  misc_feature (1166)..(1166): n is a, c, g, or t
  misc_feature (1175)..(1176): n is a, c, g, or t
  misc_feature (1179)..(1179): n is a, c, g, or t
  misc_feature (1190)..(1190): n is a, c, g, or t
  misc_feature (1193)..(1193): n is a, c, g, or t
  misc_feature (1199)..(1199): n is a, c, g, or t
  misc_feature (1203)..(1203): n is a, c, g, or t
  misc_feature (1209)..(1209): n is a, c, g, or t
  misc_feature (1211)..(1211): n is a, c, g, or t
  misc_feature (1220)..(1220): n is a, c, g, or t
  misc_feature (1222)..(1222): n is a, c, g, or t
  misc_feature (1227)..(1227): n is a, c, g, or t
  misc_feature (1241)..(1242): n is a, c, g, or t
  misc_feature (1247)..(1248): n is a, c, g, or t
  misc_feature (1251)..(1251): n is a, c, g, or t
  misc_feature (1259)..(1259): n is a, c, g, or t
  misc_feature (1264)..(1264): n is a, c, g, or t
  misc_feature (1271)..(1271): n is a, c, g, or t
  misc_feature (1275)..(1275): n is a, c, g, or t
  misc_feature (1279)..(1280): n is a, c, g, or t
  misc_feature (1288)..(1288): n is a, c, g, or t
  misc_feature (1294)..(1294): n is a, c, g, or t
  misc_feature (1299)..(1299): n is a, c, g, or t
  misc_feature (1303)..(1303): n is a, c, g, or t
  misc_feature (1307)..(1307): n is a, c, g, or t
  misc_feature (1319)..(1319): n is a, c, g, or t
  misc_feature (1321)..(1321): n is a, c, g, or t
  misc_feature (1332)..(1332): n is a, c, g, or t
  misc_feature (1340)..(1340): n is a, c, g, or t
  misc_feature (1343)..(1343): n is a, c, g, or t
  misc_feature (1352)..(1352): n is a, c, g, or t
  misc_feature (1355)..(1355): n is a, c, g, or t
  misc_feature (1357)..(1357): n is a, c, g, or t
  misc_feature (1359)..(1359): n is a, c, g, or t
  misc_feature (1361)..(1362): n is a, c, g, or t
  misc_feature (1365)..(1365): n is a, c, g, or t
  misc_feature (1367)..(1367): n is a, c, g, or t
  misc_feature (1380)..(1380): n is a, c, g, or t
  misc_feature (1383)..(1384): n is a, c, g, or t
  misc_feature (1398)..(1398): n is a, c, g, or t
  misc_feature (1401)..(1401): n is a, c, g, or t
  misc_feature (1403)..(1403): n is a, c, g, or t
  misc_feature (1410)..(1410): n is a, c, g, or t
  misc_feature (1415)..(1417): n is a, c, g, or t
  misc_feature (1422)..(1422): n is a, c, g, or t
  misc_feature (1426)..(1426): n is a, c, g, or t
  misc_feature (1431)..(1431): n is a, c, g, or t
  misc_feature (1435)..(1436): n is a, c, g, or t
  misc_feature (1439)..(1439): n is a, c, g, or t
  misc_feature (1441)..(1441): n is a, c, g, or t
  misc_feature (1447)..(1447): n is a, c, g, or t
  misc_feature (1457)..(1457): n is a, c, g, or t
  misc_feature (1460)..(1460): n is a, c, g, or t
  misc_feature (1474)..(1474): n is a, c, g, or t
  misc_feature (1476)..(1476): n is a, c, g, or t
  misc_feature (1480)..(1481): n is a, c, g, or t
  misc_feature (1483)..(1483): n is a, c, g, or t
  misc_feature (1488)..(1490): n is a, c, g, or t
  misc_feature (1493)..(1493): n is a, c, g, or t
  misc_feature (1495)..(1495): n is a, c, g, or t
  misc_feature (1497)..(1497): n is a, c, g, or t
  misc_feature (1504)..(1504): n is a, c, g, or t
  misc_feature (1506)..(1506): n is a, c, g, or t
  misc_feature (1508)..(1508): n is a, c, g, or t
  misc_feature (1513)..(1513): n is a, c, g, or t
  misc_feature (1516)..(1516): n is a, c, g, or t
  misc_feature (1519)..(1519): n is a, c, g, or t
  misc_feature (1524)..(1525): n is a, c, g, or t
  misc_feature (1530)..(1530): n is a, c, g, or t
  misc_feature (1533)..(1533): n is a, c, g, or t
  misc_feature (1536)..(1536): n is a, c, g, or t
  misc_feature (1541)..(1541): n is a, c, g, or t
  misc_feature (1544)..(1544): n is a, c, g, or t
tagagaaattactatgagaggatcgcatcaccatcaccatcacggatcctatttaggtgacactatagaatcgtcgacccacgcgtccggtaccccatgaggaggcaccagcggagagccgggaccccgaagtccccactgtccctgccgaggcgccggcgccgtcccctgtgcccttgaccacgccagcctccgccgaggaggcgatacccctccccgcgtcctccgacagcgagcggtcggcgtccagcgtggaggggcccggaggggctctgtacgcgcgcgtggcccgacgcgaggcccggccggcccgggcccggggcgagattgggggcctgtcgctgtcgccatcgcccgagcgcangaaaccgccgccacctgaccccgccaccaagcctaaggtgtcctggatccacggcaagcacagcgccgnctgcanctggcngtgcgncctcancaccgcnnccaggntccgaggccncgcccagtcccanaaagagtgaaangnacgcccatcnacaaatncggnnctatatnggtcgaacatagtnatcnctntgannccnnngancnaatnnntncgagnntntttgnntttgccncnaaanagtnctaaanagtcattcntttgcgtnnntnaccnntttcaaatnacnnnataaatntnnattnatagtncttnaaaanttnattnaannnatnaaantnaanntnantnnngattcntnnnnanaaaantngntnnaaanngcaanaattcanaagtatattcnntatntantttantccntttaaaaannnnanaaatcctntatnnatatcctnacactntaattttattnnntagaanttttttctaatttanntanncnaanattnttnnaanatatatatnnaanntattngaattncttaanaaatttatatnnacnnntntaannttncttatnnaatnnaaattgaantantaaantatatatattcttanaaanaattatttannttttatttntanaacnaatcnaanaanaattnctccttntaaatnattcaatcatttttnnnnaattntnaanagtanttnataaaattnctnntnaatccntntntaaatatatnttnnantntcantananttnntatnantattntatntntttctaaanaatttatannttntttttaaattnaanattttntctntaaatnanattttattnantaaantaaaatttactatnnaatannatntaaattanttatnttaaaantaanaagnnaattaatnctatantattnttgnagantaataaataatntnaattatatcantaataaantanttgaatatnaantntntnntantnactttcatttttnttnnctatatattataantcntntattatntaaannntatanttantcatnatannttntnattagnatttatatancantataatagtaatcnanctanntnttatnnnaancntntatttanantntatanagntcnatatnnaaaanatntantaaanatntaaa

SEQ ID NO: 955 - DNA, 1408 bp, Homo Sapiens
  misc_feature (835)..(835): n is a, c, g, or t
  misc_feature (859)..(859): n is a, c, g, or t
  misc_feature (871)..(871): n is a, c, g, or t
  misc_feature (883)..(886): n is a, c, g, or t
  misc_feature (889)..(890): n is a, c, g, or t
  misc_feature (892)..(892): n is a, c, g, or t
  misc_feature (894)..(897): n is a, c, g, or t
  misc_feature (899)..(901): n is a, c, g, or t
  misc_feature (904)..(907): n is a, c, g, or t
  misc_feature (909)..(918): n is a, c, g, or t
  misc_feature (923)..(923): n is a, c, g, or t
  misc_feature (925)..(925): n is a, c, g, or t
  misc_feature (929)..(931): n is a, c, g, or t
  misc_feature (935)..(937): n is a, c, g, or t
  misc_feature (939)..(941): n is a, c, g, or t
  misc_feature (943)..(945): n is a, c, g, or t
  misc_feature (956)..(957): n is a, c, g, or t
  misc_feature (961)..(961): n is a, c, g, or t
  misc_feature (964)..(964): n is a, c, g, or t
  misc_feature (967)..(967): n is a, c, g, or t
  misc_feature (971)..(971): n is a, c, g, or t
  misc_feature (980)..(981): n is a, c, g, or t
  misc_feature (990)..(990): n is a, c, g, or t
  misc_feature (1003)..(1007): n is a, c, g, or t
  misc_feature (1019)..(1019): n is a, c, g, or t
  misc_feature (1023)..(1023): n is a, c, g, or t
  misc_feature (1025)..(1025): n is a, c, g, or t
  misc_feature (1027)..(1027): n is a, c, g, or t
  misc_feature (1029)..(1030): n is a, c, g, or t
  misc_feature (1041)..(1041): n is a, c, g, or t
  misc_feature (1046)..(1046): n is a, c, g, or t
  misc_feature (1049)..(1050): n is a, c, g, or t
  misc_feature (1054)..(1055): n is a, c, g, or t
  misc_feature (1062)..(1062): n is a, c, g, or t
  misc_feature (1066)..(1066): n is a, c, g, or t
  misc_feature (1069)..(1069): n is a, c, g, or t
  misc_feature (1071)..(1071): n is a, c, g, or t
  misc_feature (1077)..(1079): n is a, c, g, or t
  misc_feature (1100)..(1100): n is a, c, g, or t
  misc_feature (1107)..(1107): n is a, c, g, or t
  misc_feature (1114)..(1114): n is a, c, g, or t
  misc_feature (1122)..(1122): n is a, c, g, or t
  misc_feature (1134)..(1135): n is a, c, g, or t
  misc_feature (1137)..(1137): n is a, c, g, or t
  misc_feature (1140)..(1140): n is a, c, g, or t
  misc_feature (1149)..(1149): n is a, c, g, or t
  misc_feature (1153)..(1153): n is a, c, g, or t
  misc_feature (1163)..(1163): n is a, c, g, or t
  misc_feature (1165)..(1165): n is a, c, g, or t
  misc_feature (1167)..(1167): n is a, c, g, or t
  misc_feature (1171)..(1171): n is a, c, g, or t
  misc_feature (1184)..(1185): n is a, c, g, or t
  misc_feature (1187)..(1187): n is a, c, g, or t
  misc_feature (1191)..(1191): n is a, c, g, or t
  misc_feature (1193)..(1193): n is a, c, g, or t
  misc_feature (1197)..(1198): n is a, c, g, or t
  misc_feature (1201)..(1201): n is a, c, g, or t
  misc_feature (1223)..(1227): n is a, c, g, or t
  misc_feature (1230)..(1230): n is a, c, g, or t
  misc_feature (1233)..(1235): n is a, c, g, or t
  misc_feature (1245)..(1245): n is a, c, g, or t
  misc_feature (1250)..(1250): n is a, c, g, or t
  misc_feature (1255)..(1255): n is a, c, g, or t
  misc_feature (1258)..(1258): n is a, c, g, or t
  misc_feature (1265)..(1265): n is a, c, g, or t
  misc_feature (1267)..(1267): n is a, c, g, or t
  misc_feature (1269)..(1269): n is a, c, g, or t
  misc_feature (1276)..(1276): n is a, c, g, or t
  misc_feature (1278)..(1279): n is a, c, g, or t
  misc_feature (1291)..(1294): n is a, c, g, or t
  misc_feature (1296)..(1296): n is a, c, g, or t
  misc_feature (1304)..(1305): n is a, c, g, or t
  misc_feature (1310)..(1310): n is a, c, g, or t
  misc_feature (1322)..(1323): n is a, c, g, or t
  misc_feature (1327)..(1327): n is a, c, g, or t
  misc_feature (1329)..(1329): n is a, c, g, or t
  misc_feature (1333)..(1335): n is a, c, g, or t
  misc_feature (1341)..(1342): n is a, c, g, or t
  misc_feature (1352)..(1354): n is a, c, g, or t
  misc_feature (1369)..(1369): n is a, c, g, or t
  misc_feature (1377)..(1377): n is a, c, g, or t
  misc_feature (1379)..(1379): n is a, c, g, or t
  misc_feature (1408)..(1408): n is a, c, g, or t
tagagagattactatgagaggatcgcatcaccatcaccatcacggatcctatttaggtgacactatagaatcgtcgacccacgcgtccgggagtgagagcagcccaaggatcccagggtgcagggaactccagagctgcccacctcccactgccccctcagcacacacacagtccccaggcggcctaggggccaaggctggggcggctttggtcccttttcctggcccttccttccccacttctaagccaaagaaaggagaggcaggtgctcctgtaccccagccccactcagcactgacagtccccagctcctagtagtgagctgggaggcgcttcctaagaccctttcctcagggctgccctgggagctcattcctggccaacacgccctggcagcaccagcagctcttgccacctccagctgccaaacagcagcctgccgggcagggagcagccccaggccagagaggcctcccggtccagctcagggatgctcctgccagcacaggggccagggactcctggagcaggcacatagtgagcccgggcagccctgcccagctcaggcccctttccttccccattgaggttggggtaggtgggggcggtgagggctccacgttgtcagcgctcaggaatgtgctccggcagagtgctgaagccataatccccaaccatttcccttggctgacgcccaggtactcagctggcccactccacagccaggcctggccctgcccttcaccgtggatgttttcagaagtggccatcgagaggtctggatggttttatagcaactttgctgtgattccgtttgtatctgtaaaatatttngttctatagataagatacaataantattatcccccntaaaaaaaaaannnnaannantnnnnannnaannnntnnnnnnnnnnaattnanaatnnnaaannnannnannngggggggcccnntccntanagnggancgaaataannttaattaanttaaacttgggannnnntgttgaaaaaanccanananannaacccccaaanttccnctnngggnnttttttnaaanctntnggttgnnnccgggggttttttttttgggnaaaaacnaagcttntttggggnaattttttgggnntnaangaacttaantggnaaaaaaaatncntngggnaacccccggttanntntccnangggnntcnaaaaaaaattttgaggattttnnnnntgntcnnntaactaaaanaaaangtttnctnggaatanancntttttananngaaaaaaaaaannnnantttatcgnnttttnattttttccccnngaantnctcnnntttttnnaaaaaaaaannngggaaaagaaatttnccttttancntttaaaaaaaaattttttttgggaaaaan

SEQ ID NO: 956 - DNA, 1122 bp, Homo Sapiens
  misc_feature (9)..(9): n is a, c, g, or t
  misc_feature (137)..(137): n is a, c, g, or t
  misc_feature (143)..(143): n is a, c, g, or t
  misc_feature (192)..(192): n is a, c, g, or t
  misc_feature (195)..(195): n is a, c, g, or t
  misc_feature (225)..(225): n is a, c, g, or t
  misc_feature (264)..(264): n is a, c, g, or t
  misc_feature (335)..(335): n is a, c, g, or t
  misc_feature (370)..(370): n is a, c, g, or t
  misc_feature (399)..(399): n is a, c, g, or t
  misc_feature (447)..(447): n is a, c, g, or t
  misc_feature (489)..(489): n is a, c, g, or t
  misc_feature (502)..(502): n is a, c, g, or t
  misc_feature (522)..(522): n is a, c, g, or t
  misc_feature (585)..(585): n is a, c, g, or t
  misc_feature (633)..(633): n is a, c, g, or t
  misc_feature (636)..(636): n is a, c, g, or t
  misc_feature (650)..(650): n is a, c, g, or t
  misc_feature (652)..(652): n is a, c, g, or t
  misc_feature (699)..(699): n is a, c, g, or t
  misc_feature (725)..(725): n is a, c, g, or t
  misc_feature (729)..(729): n is a, c, g, or t
  misc_feature (732)..(732): n is a, c, g, or t
  misc_feature (749)..(749): n is a, c, g, or t
  misc_feature (752)..(752): n is a, c, g, or t
  misc_feature (763)..(763): n is a, c, g, or t
  misc_feature (791)..(791): n is a, c, g, or t
  misc_feature (794)..(794): n is a, c, g, or t
  misc_feature (796)..(796): n is a, c, g, or t
  misc_feature (801)..(801): n is a, c, g, or t
  misc_feature (806)..(806): n is a, c, g, or t
  misc_feature (822)..(822): n is a, c, g, or t
  misc_feature (831)..(831): n is a, c, g, or t
  misc_feature (836)..(836): n is a, c, g, or t
  misc_feature (838)..(838): n is a, c, g, or t
  misc_feature (841)..(842): n is a, c, g, or t
  misc_feature (844)..(845): n is a, c, g, or t
  misc_feature (848)..(849): n is a, c, g, or t
  misc_feature (857)..(857): n is a, c, g, or t
  misc_feature (871)..(871): n is a, c, g, or t
  misc_feature (878)..(878): n is a, c, g, or t
  misc_feature (881)..(881): n is a, c, g, or t
  misc_feature (889)..(889): n is a, c, g, or t
  misc_feature (894)..(894): n is a, c, g, or t
  misc_feature (898)..(902): n is a, c, g, or t
  misc_feature (905)..(905): n is a, c, g, or t
  misc_feature (907)..(907): n is a, c, g, or t
  misc_feature (909)..(909): n is a, c, g, or t
  misc_feature (915)..(915): n is a, c, g, or t
  misc_feature (918)..(918): n is a, c, g, or t
  misc_feature (924)..(924): n is a, c, g, or t
  misc_feature (928)..(929): n is a, c, g, or t
  misc_feature (931)..(932): n is a, c, g, or t
  misc_feature (943)..(943): n is a, c, g, or t
  misc_feature (946)..(946): n is a, c, g, or t
  misc_feature (950)..(950): n is a, c, g, or t
  misc_feature (952)..(955): n is a, c, g, or t
  misc_feature (967)..(967): n is a, c, g, or t
  misc_feature (972)..(972): n is a, c, g, or t
  misc_feature (974)..(974): n is a, c, g, or t
  misc_feature (977)..(977): n is a, c, g, or t
  misc_feature (979)..(979): n is a, c, g, or t
  misc_feature (984)..(988): n is a, c, g, or t
  misc_feature (991)..(993): n is a, c, g, or t
  misc_feature (995)..(995): n is a, c, g, or t
  misc_feature (998)..(999): n is a, c, g, or t
  misc_feature (1007)..(1007): n is a, c, g, or t
  misc_feature (1013)..(1013): n is a, c, g, or t
  misc_feature (1016)..(1016): n is a, c, g, or t
  misc_feature (1018)..(1020): n is a, c, g, or t
  misc_feature (1023)..(1024): n is a, c, g, or t
  misc_feature (1029)..(1029): n is a, c, g, or t
  misc_feature (1031)..(1031): n is a, c, g, or t
  misc_feature (1036)..(1037): n is a, c, g, or t
  misc_feature (1040)..(1041): n is a, c, g, or t
  misc_feature (1043)..(1043): n is a, c, g, or t
  misc_feature (1045)..(1046): n is a, c, g, or t
  misc_feature (1048)..(1049): n is a, c, g, or t
  misc_feature (1051)..(1051): n is a, c, g, or t
  misc_feature (1056)..(1056): n is a, c, g, or t
  misc_feature (1058)..(1058): n is a, c, g, or t
  misc_feature (1061)..(1061): n is a, c, g, or t
  misc_feature (1064)..(1064): n is a, c, g, or t
  misc_feature (1067)..(1071): n is a, c, g, or t
  misc_feature (1073)..(1073): n is a, c, g, or t
  misc_feature (1075)..(1075): n is a, c, g, or t
  misc_feature (1077)..(1080): n is a, c, g, or t
  misc_feature (1084)..(1095): n is a, c, g, or t
  misc_feature (1098)..(1098): n is a, c, g, or t
  misc_feature (1103)..(1106): n is a, c, g, or t
  misc_feature (1108)..(1110): n is a, c, g, or t
  misc_feature (1112)..(1114): n is a, c, g, or t
  misc_feature (1116)..(1116): n is a, c, g, or t
  misc_feature (1118)..(1119): n is a, c, g, or t
  misc_feature (1121)..(1122): n is a, c, g, or t
aatagaganaattactatgagaggatcgcatcaccatcaccatcacggatcctatttaggtgacactatagaatcgtcgacccacgcgtccgcccacgcgtccgattttttttttttttttttttttttttcgcggncaacanacagtttattctatatacaaacacaattttgtacactgcaattaaatanaanggaatgagcgctcctccgcattcctccccnagtgactggtttggccgccggcccactccatccccgagngggactggaccacggccctggctgctgccactgatgttggcgcctgcaccccacgtccctatgcccgaggngcaagctctgctctcccggggaccccaagcctggngcacacgcggggagggcggggccatgganaaggcactgcagggagcaccaggcaaagccgggctgaggccggccggnactagggcgcgaggccccaccccaagccggcctctcctccanacctccgccttgntcaaaaacctgcaccatggnaccccactccatcctcaggacggttcactgcaaacctaccaagacccctccaaaaccttccgnggaaccccaccccctctccttgctgaccagctcaaacacctcactagnggntacaagcctcgggngngacctcacaccagggggaggaaagccgccttccgggcaaaccccacnaaaccctgaaagcccccgacaaaggntggncantcccaaaggaaggaggnggntggcctccccnacccccacgggatcgggaaggtcaaggnccnanccagnggggnttaaaaggcggctcanctgtgcggntcaananccnncnntcnnaagggcgnccttcctttggggnccaatgnaangccggggntaagncccnnnnnacngnancccccnaangggaantttnntnnaaaaaccttgnggnaatncnnnncggggggggaanattgncnctngnggggnnnnnggnnnanaanncccccaanaagggnccnannnggnntgggntngaaannccnntncnnannanggaangnccnttnaannnnngnanannnnaaannnnnnnnnnnnggnaaatnnnngnnncnnngntnncnn

SEQ ID NO: 957 - DNA, 1349 bp, Homo Sapiens
  misc_feature (1)..(1): n is a, c, g, or t
  misc_feature (3)..(3): n is a, c, g, or t
  misc_feature (884)..(884): n is a, c, g, or t
  misc_feature (914)..(914): n is a, c, g, or t
  misc_feature (923)..(923): n is a, c, g, or t
  misc_feature (975)..(975): n is a, c, g, or t
  misc_feature (977)..(977): n is a, c, g, or t
  misc_feature (993)..(993): n is a, c, g, or t
  misc_feature (997)..(997): n is a, c, g, or t
  misc_feature (1012)..(1012): n is a, c, g, or t
  misc_feature (1031)..(1031): n is a, c, g, or t
  misc_feature (1038)..(1038): n is a, c, g, or t
  misc_feature (1044)..(1044): n is a, c, g, or t
  misc_feature (1052)..(1052): n is a, c, g, or t
  misc_feature (1057)..(1058): n is a, c, g, or t
  misc_feature (1069)..(1069): n is a, c, g, or t
  misc_feature (1078)..(1078): n is a, c, g, or t
  misc_feature (1080)..(1080): n is a, c, g, or t
  misc_feature (1084)..(1084): n is a, c, g, or t
  misc_feature (1093)..(1093): n is a, c, g, or t
  misc_feature (1107)..(1107): n is a, c, g, or t
  misc_feature (1117)..(1117): n is a, c, g, or t
  misc_feature (1133)..(1134): n is a, c, g, or t
  misc_feature (1144)..(1144): n is a, c, g, or t
  misc_feature (1155)..(1155): n is a, c, g, or t
  misc_feature (1158)..(1158): n is a, c, g, or t
  misc_feature (1162)..(1162): n is a, c, g, or t
  misc_feature (1170)..(1170): n is a, c, g, or t
  misc_feature (1172)..(1172): n is a, c, g, or t
  misc_feature (1192)..(1192): n is a, c, g, or t
  misc_feature (1216)..(1216): n is a, c, g, or t
  misc_feature (1218)..(1218): n is a, c, g, or t
  misc_feature (1220)..(1220): n is a, c, g, or t
  misc_feature (1225)..(1226): n is a, c, g, or t
  misc_feature (1239)..(1239): n is a, c, g, or t
  misc_feature (1246)..(1246): n is a, c, g, or t
  misc_feature (1249)..(1250): n is a, c, g, or t
  misc_feature (1259)..(1259): n is a, c, g, or t
  misc_feature (1264)..(1264): n is a, c, g, or t
  misc_feature (1271)..(1273): n is a, c, g, or t
  misc_feature (1277)..(1277): n is a, c, g, or t
  misc_feature (1281)..(1282): n is a, c, g, or t
  misc_feature (1290)..(1290): n is a, c, g, or t
  misc_feature (1294)..(1294): n is a, c, g, or t
  misc_feature (1308)..(1308): n is a, c, g, or t
  misc_feature (1312)..(1314): n is a, c, g, or t
  misc_feature (1316)..(1317): n is a, c, g, or t
  misc_feature (1319)..(1336): n is a, c, g, or t
  misc_feature (1339)..(1339): n is a, c, g, or t
  misc_feature (1344)..(1344): n is a, c, g, or t
nanttagagaaattactatgagaggatcgcatcaccatcaccatcacggatcctatttaggtgacactatagaatcgtcgacccacgcgtccggtgggaaaactttccaaacaaaggcaaacctctctcagcatcagagaattcatagtggagagaaaccctataaatgtaaagaatgtggcaaagccttttgtcagagcccatctcttattaaacaccagcgaattcatactggagaaaaaccatataagtgtaaagaatgtggcaaagcgtttactcagagcaccccactcactaaacatcagagaatacatacaggggagagaccctacaaatgcagtgaatgtggtaaagccttcattcagagcatttgccttattcggcaccagagaagtcacactggagaaaaaccctataaatgcaatgaatgtggaaagggctttaatcagaacacctgcctcactcagcatatgagaattcatactggagagaagccctataaatgtaaagaatgtgggaaagcctttgctcatagctcatctcttactgaacatcatagaactcacactggtgagaagctctataaatgtagtgagtgtgagaaaaccttccgcaagtatgcacaccttagtgaacattacagaattcacactggtgagaagccttatgagtgtattgagtgtggaaagttcttcagacatagttcagtccttttcagacatcagaaacttcacagtggtgactaatgctgccatttaggttatgacagtttctctagcgaggatgactacgaatctgactgggagtagagggggcaggtagagttcctggagggaaggatgaaggagccttggctactgtactctgagaggaatgttttccanaaatggaggtgggagcttaagggaatgcanagcctactngaggggggcatctgggaatacaggggtaaaaaaaaattccctgcttttccananaaagccctaccccatngccncctgtctccccctgnggactcttacagccttggnggaagcnttttgnttaccccnttctnnttcccttttantaccttccngncccncatttctgnacttggccccccanttttctttgnctggcagggttgaaanntttttccttnaaaccctgccngtncagngggaaagngnccccccccctgaaggaaggncaaacccaccccccccaatttggngncnccccnnacccggctccccngggggangcnnccccccggngaaanggccctnnnaaangggnnccaaaccntttnaacccccaaaaaanacannnannannnnnnnnnnnnnnnnnnganggggnccccc

SEQ ID NO: 958 - DNA, 1320 bp, Homo Sapiens
  misc_feature (3)..(3): n is a, c, g, or t
  misc_feature (912)..(912): n is a, c, g, or t
  misc_feature (940)..(940): n is a, c, g, or t
  misc_feature (951)..(951): n is a, c, g, or t
  misc_feature (974)..(974): n is a, c, g, or t
  misc_feature (986)..(986): n is a, c, g, or t
  misc_feature (992)..(992): n is a, c, g, or t
  misc_feature (1023)..(1023): n is a, c, g, or t
  misc_feature (1036)..(1036): n is a, c, g, or t
  misc_feature (1057)..(1057): n is a, c, g, or t
  misc_feature (1062)..(1062): n is a, c, g, or t
  misc_feature (1081)..(1081): n is a, c, g, or t
  misc_feature (1088)..(1088): n is a, c, g, or t
  misc_feature (1093)..(1093): n is a, c, g, or t
  misc_feature (1096)..(1096): n is a, c, g, or t
  misc_feature (1098)..(1098): n is a, c, g, or t
  misc_feature (1107)..(1108): n is a, c, g, or t
  misc_feature (1111)..(1111): n is a, c, g, or t
  misc_feature (1119)..(1119): n is a, c, g, or t
  misc_feature (1121)..(1121): n is a, c, g, or t
  misc_feature (1125)..(1125): n is a, c, g, or t
  misc_feature (1128)..(1129): n is a, c, g, or t
  misc_feature (1138)..(1138): n is a, c, g, or t
  misc_feature (1148)..(1148): n is a, c, g, or t
  misc_feature (1153)..(1153): n is a, c, g, or t
  misc_feature (1157)..(1158): n is a, c, g, or t
  misc_feature (1161)..(1161): n is a, c, g, or t
  misc_feature (1168)..(1168): n is a, c, g, or t
  misc_feature (1173)..(1173): n is a, c, g, or t
  misc_feature (1175)..(1175): n is a, c, g, or t
  misc_feature (1179)..(1179): n is a, c, g, or t
  misc_feature (1184)..(1184): n is a, c, g, or t
  misc_feature (1188)..(1189): n is a, c, g, or t
  misc_feature (1192)..(1192): n is a, c, g, or t
  misc_feature (1195)..(1195): n is a, c, g, or t
  misc_feature (1200)..(1201): n is a, c, g, or t
  misc_feature (1209)..(1210): n is a, c, g, or t
  misc_feature (1213)..(1213): n is a, c, g, or t
  misc_feature (1219)..(1219): n is a, c, g, or t
  misc_feature (1227)..(1227): n is a, c, g, or t
  misc_feature (1229)..(1229): n is a, c, g, or t
  misc_feature (1232)..(1232): n is a, c, g, or t
  misc_feature (1242)..(1242): n is a, c, g, or t
  misc_feature (1244)..(1244): n is a, c, g, or t
  misc_feature (1249)..(1249): n is a, c, g, or t
  misc_feature (1254)..(1254): n is a, c, g, or t
  misc_feature (1256)..(1256): n is a, c, g, or t
  misc_feature (1260)..(1261): n is a, c, g, or t
  misc_feature (1265)..(1265): n is a, c, g, or t
  misc_feature (1270)..(1270): n is a, c, g, or t
  misc_feature (1272)..(1272): n is a, c, g, or t
  misc_feature (1276)..(1276): n is a, c, g, or t
  misc_feature (1282)..(1282): n is a, c, g, or t
  misc_feature (1295)..(1296): n is a, c, g, or t
  misc_feature (1302)..(1303): n is a, c, g, or t
  misc_feature (1309)..(1310): n is a, c, g, or t
  misc_feature (1316)..(1318): n is a, c, g, or t
  misc_feature (1320)..(1320): n is a, c, g, or t
cantagagaaattactatgagaggatcgcatcaccatcaccatcacggatcctatttaggtgacactatagaatcgtcgacccacgcgtccggtggccgggagatgatggctgatgaagaggaagaagtcaagccgatcttgcagaaattgcaggaactcgtggatcagctctactcatttcgagactgctatttcgagacacatagtgttgaggatgctgggaggaagcaacaggatgtgcggaaggagatggagaaaaccctacagcagatggaagaagtagtgggttctgtccagggcaaggcacaagttctaatgctaactgggaaagcactaaatgtgactcctgactatagccctaaggctgaggagcttctgtcaaaggctgtgaagctggagcccgagctggtggaagcctggaaccagctgggtgaggtgtactggaaaaaaggggatgttgcagctgcccacacctgcttctcaggagccctcacccattgcaggaacaaagtctccttgcaaaacctgtcaatggtgcttcgtcagctgcggactgacactgaagatgaacattctcaccatgtcatggacagtgtccgacaggctaagttggctgttcagatggatgtccatgatggccgctcctggtatattcttgggaattcatatctttccctttacttctctactggccagaaccctaagatctcccagcaagccctcagtgcctatgcccaagcagagaaagttgacagaaaagcttctagcaatcctgaccttcatctgaacagggcgacgttgcataaatatgaagagagttatggggaggccctggagggcttctctcgggctgcagccctggaccctgcctggccagagccccggcaacgagagcaacaacttctggaatncctggatagattaaccagcctccttganagtaagggaangtgaaaaccaaaaagctgcaaancatgctgggaancttgcncccagcccatctaggcccttgcagtgatggncactatcagtcancctctgggcaaaaagtgaccntgganctcaagcccctgaataccnttccccnggggnganancggggcccnntcntgggaaangnggtnttnnccccccccnaaaaaaaaanccccnttannttngcccggnaaatncnaagnacctngctnnccnggnggggnnaaaaaaanngcnaaactngggagggncnttngaaaactttnanctttnttaancncccnngggnttccnantttnaaaaanaaaaaattttttnntttttnngggaanncccccnnncn

SEQ ID NO: 959 - DNA, 1621 bp, Homo Sapiens
  misc_feature (4)..(4): n is a, c, g, or t
  misc_feature (6)..(6): n is a, c, g, or t
  misc_feature (15)..(15): n is a, c, g, or t
  misc_feature (20)..(20): n is a, c, g, or t
  misc_feature (26)..(26): n is a, c, g, or t
  misc_feature (33)..(33): n is a, c, g, or t
  misc_feature (42)..(42): n is a, c, g, or t
  misc_feature (71)..(71): n is a, c, g, or t
  misc_feature (78)..(78): n is a, c, g, or t
  misc_feature (93)..(93): n is a, c, g, or t
  misc_feature (101)..(101): n is a, c, g, or t
  misc_feature (132)..(133): n is a, c, g, or t
  misc_feature (141)..(141): n is a, c, g, or t
  misc_feature (152)..(152): n is a, c, g, or t
  misc_feature (162)..(162): n is a, c, g, or t
  misc_feature (215)..(215): n is a, c, g, or t
  misc_feature (219)..(220): n is a, c, g, or t
  misc_feature (224)..(224): n is a, c, g, or t
  misc_feature (238)..(238): n is a, c, g, or t
  misc_feature (242)..(242): n is a, c, g, or t
  misc_feature (244)..(244): n is a, c, g, or t
  misc_feature (247)..(248): n is a, c, g, or t
  misc_feature (255)..(255): n is a, c, g, or t
  misc_feature (258)..(258): n is a, c, g, or t
  misc_feature (266)..(266): n is a, c, g, or t
  misc_feature (269)..(271): n is a, c, g, or t
  misc_feature (275)..(275): n is a, c, g, or t
  misc_feature (292)..(292): n is a, c, g, or t
  misc_feature (299)..(299): n is a, c, g, or t
  misc_feature (305)..(307): n is a, c, g, or t
  misc_feature (312)..(312): n is a, c, g, or t
  misc_feature (316)..(316): n is a, c, g, or t
  misc_feature (319)..(319): n is a, c, g, or t
  misc_feature (321)..(321): n is a, c, g, or t
  misc_feature (323)..(323): n is a, c, g, or t
  misc_feature (331)..(332): n is a, c, g, or t
  misc_feature (334)..(335): n is a, c, g, or t
  misc_feature (338)..(338): n is a, c, g, or t
  misc_feature (341)..(341): n is a, c, g, or t
  misc_feature (348)..(349): n is a, c, g, or t
  misc_feature (351)..(352): n is a, c, g, or t
  misc_feature (355)..(355): n is a, c, g, or t
  misc_feature (358)..(358): n is a, c, g, or t
  misc_feature (362)..(362): n is a, c, g, or t
  misc_feature (368)..(370): n is a, c, g, or t
  misc_feature (380)..(381): n is a, c, g, or t
  misc_feature (384)..(384): n is a, c, g, or t
  misc_feature (388)..(388): n is a, c, g, or t
  misc_feature (393)..(393): n is a, c, g, or t
  misc_feature (395)..(395): n is a, c, g, or t
  misc_feature (406)..(406): n is a, c, g, or t
  misc_feature (415)..(416): n is a, c, g, or t
  misc_feature (419)..(420): n is a, c, g, or t
  misc_feature (423)..(423): n is a, c, g, or t
  misc_feature (426)..(426): n is a, c, g, or t
  misc_feature (431)..(431): n is a, c, g, or t
  misc_feature (434)..(436): n is a, c, g, or t
  misc_feature (439)..(439): n is a, c, g, or t
  misc_feature (441)..(441): n is a, c, g, or t
  misc_feature (445)..(448): n is a, c, g, or t
  misc_feature (450)..(450): n is a, c, g, or t
  misc_feature (454)..(454): n is a, c, g, or t
  misc_feature (456)..(458): n is a, c, g, or t
  misc_feature (461)..(461): n is a, c, g, or t
  misc_feature (466)..(466): n is a, c, g, or t
  misc_feature (475)..(475): n is a, c, g, or t
  misc_feature (481)..(481): n is a, c, g, or t
  misc_feature (486)..(486): n is a, c, g, or t
  misc_feature (489)..(489): n is a, c, g, or t
  misc_feature (493)..(494): n is a, c, g, or t
  misc_feature (497)..(497): n is a, c, g, or t
  misc_feature (502)..(502): n is a, c, g, or t
  misc_feature (507)..(507): n is a, c, g, or t
  misc_feature (512)..(512): n is a, c, g, or t
  misc_feature (516)..(516): n is a, c, g, or t
  misc_feature (518)..(521): n is a, c, g, or t
  misc_feature (523)..(523): n is a, c, g, or t
  misc_feature (531)..(531): n is a, c, g, or t
  misc_feature (533)..(533): n is a, c, g, or t
  misc_feature (544)..(544): n is a, c, g, or t
  misc_feature (549)..(549): n is a, c, g, or t
  misc_feature (551)..(552): n is a, c, g, or t
  misc_feature (555)..(555): n is a, c, g, or t
  misc_feature (558)..(559): n is a, c, g, or t
  misc_feature (562)..(562): n is a, c, g, or t
  misc_feature (565)..(565): n is a, c, g, or t
  misc_feature (570)..(570): n is a, c, g, or t
  misc_feature (572)..(572): n is a, c, g, or t
  misc_feature (579)..(581): n is a, c, g, or t
  misc_feature (586)..(586): n is a, c, g, or t
  misc_feature (591)..(591): n is a, c, g, or t
  misc_feature (609)..(611): n is a, c, g, or t
  misc_feature (613)..(613): n is a, c, g, or t
  misc_feature (615)..(616): n is a, c, g, or t
  misc_feature (624)..(624): n is a, c, g, or t
  misc_feature (628)..(628): n is a, c, g, or t
  misc_feature (635)..(635): n is a, c, g, or t
  misc_feature (639)..(639): n is a, c, g, or t
  misc_feature (642)..(642): n is a, c, g, or t
  misc_feature (644)..(644): n is a, c, g, or t
  misc_feature (648)..(648): n is a, c, g, or t
  misc_feature (655)..(656): n is a, c, g, or t
  misc_feature (658)..(661): n is a, c, g, or t
  misc_feature (668)..(668): n is a, c, g, or t
  misc_feature (673)..(674): n is a, c, g, or t
  misc_feature (680)..(680): n is a, c, g, or t
  misc_feature (684)..(685): n is a, c, g, or t
  misc_feature (691)..(694): n is a, c, g, or t
  misc_feature (700)..(702): n is a, c, g, or t
  misc_feature (704)..(704): n is a, c, g, or t
  misc_feature (706)..(707): n is a, c, g, or t
  misc_feature (710)..(710): n is a, c, g, or t
  misc_feature (714)..(714): n is a, c, g, or t
  misc_feature (716)..(716): n is a, c, g, or t
  misc_feature (719)..(719): n is a, c, g, or t
  misc_feature (721)..(721): n is a, c, g, or t
  misc_feature (723)..(725): n is a, c, g, or t
  misc_feature (731)..(731): n is a, c, g, or t
  misc_feature (737)..(737): n is a, c, g, or t
  misc_feature (741)..(742): n is a, c, g, or t
  misc_feature (744)..(746): n is a, c, g, or t
  misc_feature (759)..(759): n is a, c, g, or t
  misc_feature (763)..(764): n is a, c, g, or t
  misc_feature (772)..(772): n is a, c, g, or t
  misc_feature (774)..(777): n is a, c, g, or t
  misc_feature (784)..(784): n is a, c, g, or t
  misc_feature (787)..(787): n is a, c, g, or t
  misc_feature (790)..(790): n is a, c, g, or t
  misc_feature (797)..(797): n is a, c, g, or t
  misc_feature (800)..(800): n is a, c, g, or t
  misc_feature (803)..(804): n is a, c, g, or t
  misc_feature (809)..(809): n is a, c, g, or t
  misc_feature (816)..(816): n is a, c, g, or t
  misc_feature (820)..(820): n is a, c, g, or t
  misc_feature (826)..(826): n is a, c, g, or t
  misc_feature (829)..(830): n is a, c, g, or t
  misc_feature (836)..(839): n is a, c, g, or t
  misc_feature (846)..(846): n is a, c, g, or t
  misc_feature (849)..(852): n is a, c, g, or t
  misc_feature (861)..(861): n is a, c, g, or t
  misc_feature (877)..(878): n is a, c, g, or t
  misc_feature (890)..(890): n is a, c, g, or t
  misc_feature (892)..(892): n is a, c, g, or t
  misc_feature (894)..(894): n is a, c, g, or t
  misc_feature (896)..(896): n is a, c, g, or t
  misc_feature (898)..(898): n is a, c, g, or t
  misc_feature (902)..(902): n is a, c, g, or t
  misc_feature (905)..(905): n is a, c, g, or t
  misc_feature (907)..(907): n is a, c, g, or t
  misc_feature (910)..(911): n is a, c, g, or t
  misc_feature (913)..(915): n is a, c, g, or t
  misc_feature (921)..(921): n is a, c, g, or t
  misc_feature (940)..(940): n is a, c, g, or t
  misc_feature (944)..(946): n is a, c, g, or t
  misc_feature (948)..(948): n is a, c, g, or t
  misc_feature (951)..(952): n is a, c, g, or t
  misc_feature (956)..(956): n is a, c, g, or t
  misc_feature (961)..(962): n is a, c, g, or t
  misc_feature (972)..(972): n is a, c, g, or t
  misc_feature (976)..(976): n is a, c, g, or t
  misc_feature (979)..(979): n is a, c, g, or t
  misc_feature (982)..(983): n is a, c, g, or t
  misc_feature (988)..(988): n is a, c, g, or t
  misc_feature (991)..(992): n is a, c, g, or t
  misc_feature (1001)..(1001): n is a, c, g, or t
  misc_feature (1010)..(1011): n is a, c, g, or t
  misc_feature (1013)..(1013): n is a, c, g, or t
  misc_feature (1019)..(1021): n is a, c, g, or t
  misc_feature (1024)..(1024): n is a, c, g, or t
  misc_feature (1027)..(1027): n is a, c, g, or t
  misc_feature (1032)..(1033): n is a, c, g, or t
  misc_feature (1040)..(1040): n is a, c, g, or t
  misc_feature (1046)..(1048): n is a, c, g, or t
  misc_feature (1063)..(1063): n is a, c, g, or t
  misc_feature (1065)..(1065): n is a, c, g, or t
  misc_feature (1067)..(1068): n is a, c, g, or t
  misc_feature (1075)..(1075): n is a, c, g, or t
  misc_feature (1080)..(1081): n is a, c, g, or t
  misc_feature (1092)..(1092): n is a, c, g, or t
  misc_feature (1102)..(1102): n is a, c, g, or t
  misc_feature (1104)..(1104): n is a, c, g, or t
  misc_feature (1107)..(1110): n is a, c, g, or t
  misc_feature (1113)..(1113): n is a, c, g, or t
  misc_feature (1116)..(1116): n is a, c, g, or t
  misc_feature (1120)..(1120): n is a, c, g, or t
  misc_feature (1128)..(1128): n is a, c, g, or t
  misc_feature (1131)..(1131): n is a, c, g, or t
  misc_feature (1134)..(1135): n is a, c, g, or t
  misc_feature (1137)..(1137): n is a, c, g, or t
  misc_feature (1139)..(1139): n is a, c, g, or t
  misc_feature (1145)..(1145): n is a, c, g, or t
  misc_feature (1150)..(1151): n is a, c, g, or t
  misc_feature (1158)..(1158): n is a, c, g, or t
  misc_feature (1161)..(1161): n is a, c, g, or t
  misc_feature (1169)..(1171): n is a, c, g, or t
  misc_feature (1188)..(1188): n is a, c, g, or t
  misc_feature (1197)..(1200): n is a, c, g, or t
  misc_feature (1206)..(1206): n is a, c, g, or t
  misc_feature (1219)..(1221): n is a, c, g, or t
  misc_feature (1226)..(1227): n is a, c, g, or t
  misc_feature (1229)..(1229): n is a, c, g, or t
  misc_feature (1233)..(1233): n is a, c, g, or t
  misc_feature (1235)..(1235): n is a, c, g, or t
  misc_feature (1238)..(1238): n is a, c, g, or t
  misc_feature (1240)..(1240): n is a, c, g, or t
  misc_feature (1248)..(1248): n is a, c, g, or t
  misc_feature (1251)..(1251): n is a, c, g, or t
  misc_feature (1254)..(1255): n is a, c, g, or t
  misc_feature (1268)..(1268): n is a, c, g, or t
  misc_feature (1270)..(1270): n is a, c, g, or t
  misc_feature (1274)..(1274): n is a, c, g, or t
  misc_feature (1278)..(1278): n is a, c, g, or t
  misc_feature (1280)..(1281): n is a, c, g, or t
  misc_feature (1285)..(1285): n is a, c, g, or t
  misc_feature (1288)..(1288): n is a, c, g, or t
  misc_feature (1292)..(1292): n is a, c, g, or t
  misc_feature (1305)..(1305): n is a, c, g, or t
  misc_feature (1313)..(1313): n is a, c, g, or t
  misc_feature (1325)..(1325): n is a, c, g, or t
  misc_feature (1328)..(1328): n is a, c, g, or t
  misc_feature (1330)..(1332): n is a, c, g, or t
  misc_feature (1339)..(1339): n is a, c, g, or t
  misc_feature (1341)..(1342): n is a, c, g, or t
  misc_feature (1344)..(1345): n is a, c, g, or t
  misc_feature (1347)..(1347): n is a, c, g, or t
  misc_feature (1349)..(1349): n is a, c, g, or t
  misc_feature (1352)..(1352): n is a, c, g, or t
  misc_feature (1354)..(1355): n is a, c, g, or t
  misc_feature (1358)..(1359): n is a, c, g, or t
  misc_feature (1369)..(1369): n is a, c, g, or t
  misc_feature (1376)..(1376): n is a, c, g, or t
  misc_feature (1379)..(1380): n is a, c, g, or t
  misc_feature (1388)..(1389): n is a, c, g, or t
  misc_feature (1398)..(1398): n is a, c, g, or t
  misc_feature (1404)..(1405): n is a, c, g, or t
  misc_feature (1407)..(1407): n is a, c, g, or t
  misc_feature (1409)..(1409): n is a, c, g, or t
  misc_feature (1414)..(1414): n is a, c, g, or t
  misc_feature (1425)..(1426): n is a, c, g, or t
  misc_feature (1429)..(1429): n is a, c, g, or t
  misc_feature (1439)..(1439): n is a, c, g, or t
  misc_feature (1445)..(1445): n is a, c, g, or t
  misc_feature (1450)..(1450): n is a, c, g, or t
  misc_feature (1455)..(1455): n is a, c, g, or t
  misc_feature (1457)..(1457): n is a, c, g, or t
  misc_feature (1460)..(1460): n is a, c, g, or t
  misc_feature (1462)..(1463): n is a, c, g, or t
  misc_feature (1466)..(1467): n is a, c, g, or t
  misc_feature (1471)..(1473): n is a, c, g, or t
  misc_feature (1481)..(1481): n is a, c, g, or t
  misc_feature (1486)..(1486): n is a, c, g, or t
  misc_feature (1492)..(1492): n is a, c, g, or t
  misc_feature (1514)..(1514): n is a, c, g, or t
  misc_feature (1519)..(1519): n is a, c, g, or t
  misc_feature (1524)..(1524): n is a, c, g, or t
  misc_feature (1527)..(1527): n is a, c, g, or t
  misc_feature (1535)..(1535): n is a, c, g, or t
  misc_feature (1540)..(1540): n is a, c, g, or t
  misc_feature (1549)..(1550): n is a, c, g, or t
  misc_feature (1557)..(1557): n is a, c, g, or t
  misc_feature (1567)..(1567): n is a, c, g, or t
  misc_feature (1575)..(1575): n is a, c, g, or t
  misc_feature (1578)..(1578): n is a, c, g, or t
  misc_feature (1590)..(1590): n is a, c, g, or t
  misc_feature (1596)..(1596): n is a, c, g, or t
  misc_feature (1601)..(1602): n is a, c, g, or t
  misc_feature (1605)..(1605): n is a, c, g, or t
  misc_feature (1611)..(1611): n is a, c, g, or t
  misc_feature (1616)..(1616): n is a, c, g, or t
  misc_feature (1618)..(1621): n is a, c, g, or t
cccnancattgaganattantatggngaggatngcatcaccntcaccatcacgggatcctatttaggtganactatanaatcgatctacccangagggcgnccacgtcatccgcgctcataccccgccgcanncggctggnacgtacggtancccgcaagtnccgggccgaggtccgaggaggcgtcctctgcccggtggcccagaggtcaatcngggnncggngttcatcttgcatngttntntcnnggccgcnatncgtccccngannngccnctgaggtcgaccgcganttcgagntcaagnnncaccnggcngcncngnaggaacannanntgnccnccttagnncnngtnacngctnttgttnnngggaaatctnntgntcantattncnccaaagcttcncatgcgttnncanntanccnagctngannngantncctnnnnangacngnnnatnattgnttcgaagcncagaanttgtnctntctnncanccgcnaaaanctctntaanannnntntaacctcnantaaacagtctntcctncnnaancannacntanagaananttcctannntggtntcttnccccatgaaacttgttgnnnananntcctatancaanactcctncttnagntnattnataaagnnannnnattcttntgatnngaaaanttcnnccaaannnnccctannnanannatntttncnaanantnnnactttnaaaatngccnnannnttaaacacaaaancctnngaaaaatntnnnnttttttntgnaanacttttncantannataantttaaanaatncctgtnttnngtttannnngtaaaanaannnnccttaattngcccttttttctcccnntaaaaaataaancntntntntccnaananacnnannnatctantagggactccatttttctncctnnntnaanntctncatcnnaatttttgtncatnatntannactcnctnnctttttatnttaatcatnnanatatannntantcntctanntctcacnacattnnntttgttaaaacaatncntnntttccanagatnnattcttgagtntaccaataantnttnnnnctnttntctnttaaaacncantannantnttcacnatatnncctcccnttngtcttaannnctagctccataaaatcncttttttannnngatttntttccgccacttnnncattnntntctncncancntacttaantantcnntattcattttaancncccntttntnnagtnatnattnaaacaatcatttntcttaccntacatataatanaantnnnatctctncnnannantnctntnnatnnataattaaanaataatnatnnattttttnntccattatnttttanncnanaatanttgaaatcctnncanaaccagttanttcacnctttntctcnanaanannaanntctnnncctctatnttctnactccntttattttcacatctatcccgntcatnttttnttnttatcacnttttntctctcttnnattttcnctttattcantttttatnatntacaattcttcntcctantaccnntgncaaatntcaancnnnn

SEQ ID NO: 960 - DNA, 1658 bp, Homo Sapiens
  misc_feature (2)..(3): n is a, c, g, or t
  misc_feature (5)..(5): n is a, c, g, or t
  misc_feature (275)..(275): n is a, c, g, or t
  misc_feature (291)..(291): n is a, c, g, or t
  misc_feature (293)..(294): n is a, c, g, or t
  misc_feature (304)..(304): n is a, c, g, or t
  misc_feature (308)..(309): n is a, c, g, or t
  misc_feature (312)..(312): n is a, c, g, or t
  misc_feature (314)..(314): n is a, c, g, or t
  misc_feature (316)..(316): n is a, c, g, or t
  misc_feature (318)..(318): n is a, c, g, or t
  misc_feature (322)..(322): n is a, c, g, or t
  misc_feature (324)..(324): n is a, c, g, or t
  misc_feature (335)..(335): n is a, c, g, or t
  misc_feature (338)..(338): n is a, c, g, or t
  misc_feature (341)..(341): n is a, c, g, or t
  misc_feature (346)..(346): n is a, c, g, or t
  misc_feature (349)..(350): n is a, c, g, or t
  misc_feature (355)..(356): n is a, c, g, or t
  misc_feature (359)..(359): n is a, c, g, or t
  misc_feature (365)..(365): n is a, c, g, or t
  misc_feature (367)..(367): n is a, c, g, or t
  misc_feature (373)..(374): n is a, c, g, or t
  misc_feature (376)..(376): n is a, c, g, or t
  misc_feature (378)..(378): n is a, c, g, or t
  misc_feature (380)..(380): n is a, c, g, or t
  misc_feature (385)..(385): n is a, c, g, or t
  misc_feature (390)..(390): n is a, c, g, or t
  misc_feature (392)..(392): n is a, c, g, or t
  misc_feature (394)..(400): n is a, c, g, or t
  misc_feature (402)..(405): n is a, c, g, or t
  misc_feature (407)..(407): n is a, c, g, or t
  misc_feature (417)..(418): n is a, c, g, or t
  misc_feature (422)..(422): n is a, c, g, or t
  misc_feature (424)..(424): n is a, c, g, or t
  misc_feature (430)..(431): n is a, c, g, or t
  misc_feature (438)..(438): n is a, c, g, or t
  misc_feature (441)..(442): n is a, c, g, or t
  misc_feature (446)..(446): n is a, c, g, or t
  misc_feature (450)..(452): n is a, c, g, or t
  misc_feature (462)..(462): n is a, c, g, or t
  misc_feature (465)..(465): n is a, c, g, or t
  misc_feature (467)..(467): n is a, c, g, or t
  misc_feature (471)..(471): n is a, c, g, or t
  misc_feature (474)..(474): n is a, c, g, or t
  misc_feature (477)..(479): n is a, c, g, or t
  misc_feature (482)..(483): n is a, c, g, or t
  misc_feature (486)..(486): n is a, c, g, or t
  misc_feature (488)..(489): n is a, c, g, or t
  misc_feature (493)..(493): n is a, c, g, or t
  misc_feature (495)..(497): n is a, c, g, or t
  misc_feature (501)..(501): n is a, c, g, or t
  misc_feature (503)..(503): n is a, c, g, or t
  misc_feature (507)..(507): n is a, c, g, or t
  misc_feature (511)..(511): n is a, c, g, or t
  misc_feature (514)..(516): n is a, c, g, or t
  misc_feature (520)..(521): n is a, c, g, or t
  misc_feature (525)..(525): n is a, c, g, or t
  misc_feature (532)..(534): n is a, c, g, or t
  misc_feature (552)..(553): n is a, c, g, or t
  misc_feature (555)..(555): n is a, c, g, or t
  misc_feature (558)..(559): n is a, c, g, or t
  misc_feature (563)..(563): n is a, c, g, or t
  misc_feature (565)..(565): n is a, c, g, or t
  misc_feature (568)..(568): n is a, c, g, or t
  misc_feature (573)..(574): n is a, c, g, or t
  misc_feature (583)..(583): n is a, c, g, or t
  misc_feature (590)..(590): n is a, c, g, or t
  misc_feature (592)..(592): n is a, c, g, or t
  misc_feature (594)..(594): n is a, c, g, or t
  misc_feature (596)..(596): n is a, c, g, or t
  misc_feature (601)..(601): n is a, c, g, or t
  misc_feature (607)..(607): n is a, c, g, or t
  misc_feature (610)..(610): n is a, c, g, or t
  misc_feature (613)..(618): n is a, c, g, or t
  misc_feature (623)..(623): n is a, c, g, or t
  misc_feature (625)..(628): n is a, c, g, or t
  misc_feature (631)..(631): n is a, c, g, or t
  misc_feature (634)..(634): n is a, c, g, or t
  misc_feature (636)..(636): n is a, c, g, or t
  misc_feature (639)..(639): n is a, c, g, or t
  misc_feature (641)..(643): n is a, c, g, or t
  misc_feature (645)..(645): n is a, c, g, or t
  misc_feature (649)..(649): n is a, c, g, or t
  misc_feature (651)..(651): n is a, c, g, or t
  misc_feature (655)..(655): n is a, c, g, or t
  misc_feature (657)..(658): n is a, c, g, or t
  misc_feature (663)..(664): n is a, c, g, or t
  misc_feature (668)..(668): n is a, c, g, or t
  misc_feature (673)..(673): n is a, c, g, or t
  misc_feature (676)..(677): n is a, c, g, or t
  misc_feature (681)..(681): n is a, c, g, or t
  misc_feature (686)..(688): n is a, c, g, or t
  misc_feature (693)..(694): n is a, c, g, or t
  misc_feature (697)..(698): n is a, c, g, or t
  misc_feature (700)..(700): n is a, c, g, or t
  misc_feature (702)..(702): n is a, c, g, or t
  misc_feature (706)..(706): n is a, c, g, or t
  misc_feature (709)..(709): n is a, c, g, or t
  misc_feature (712)..(713): n is a, c, g, or t
  misc_feature (715)..(715): n is a, c, g, or t
  misc_feature (717)..(718): n is a, c, g, or t
  misc_feature (720)..(720): n is a, c, g, or t
  misc_feature (722)..(722): n is a, c, g, or t
  misc_feature (724)..(724): n is a, c, g, or t
  misc_feature (727)..(727): n is a, c, g, or t
  misc_feature (730)..(730): n is a, c, g, or t
  misc_feature (733)..(736): n is a, c, g, or t
  misc_feature (738)..(739): n is a, c, g, or t
  misc_feature (746)..(746): n is a, c, g, or t
  misc_feature (753)..(753): n is a, c, g, or t
  misc_feature (756)..(756): n is a, c, g, or t
  misc_feature (761)..(761): n is a, c, g, or t
  misc_feature (763)..(766): n is a, c, g, or t
  misc_feature (769)..(769): n is a, c, g, or t
  misc_feature (773)..(773): n is a, c, g, or t
  misc_feature (780)..(780): n is a, c, g, or t
  misc_feature (783)..(785): n is a, c, g, or t
  misc_feature (787)..(787): n is a, c, g, or t
  misc_feature (792)..(792): n is a, c, g, or t
  misc_feature (795)..(795): n is a, c, g, or t
  misc_feature (799)..(800): n is a, c, g, or t
  misc_feature (803)..(803): n is a, c, g, or t
  misc_feature (806)..(806): n is a, c, g, or t
  misc_feature (808)..(809): n is a, c, g, or t
  misc_feature (811)..(811): n is a, c, g, or t
  misc_feature (815)..(816): n is a, c, g, or t
  misc_feature (818)..(818): n is a, c, g, or t
  misc_feature (820)..(820): n is a, c, g, or t
  misc_feature (824)..(825): n is a, c, g, or t
  misc_feature (827)..(827): n is a, c, g, or t
  misc_feature (834)..(834): n is a, c, g, or t
  misc_feature (837)..(838): n is a, c, g, or t
  misc_feature (842)..(842): n is a, c, g, or t
  misc_feature (846)..(846): n is a, c, g, or t
  misc_feature (848)..(848): n is a, c, g, or t
  misc_feature (850)..(850): n is a, c, g, or t
  misc_feature (852)..(852): n is a, c, g, or t
  misc_feature (858)..(858): n is a, c, g, or t
  misc_feature (864)..(864): n is a, c, g, or t
  misc_feature (868)..(870): n is a, c, g, or t
  misc_feature (876)..(876): n is a, c, g, or t
  misc_feature (885)..(885): n is a, c, g, or t
  misc_feature (895)..(895): n is a, c, g, or t
  misc_feature (899)..(899): n is a, c, g, or t
  misc_feature (902)..(902): n is a, c, g, or t
  misc_feature (914)..(914): n is a, c, g, or t
  misc_feature (923)..(923): n is a, c, g, or t
  misc_feature (926)..(926): n is a, c, g, or t
  misc_feature (929)..(932): n is a, c, g, or t
  misc_feature (936)..(936): n is a, c, g, or t
  misc_feature (939)..(940): n is a, c, g, or t
  misc_feature (942)..(942): n is a, c, g, or t
  misc_feature (945)..(945): n is a, c, g, or t
  misc_feature (954)..(954): n is a, c, g, or t
  misc_feature (956)..(956): n is a, c, g, or t
  misc_feature (963)..(964): n is a, c, g, or t
  misc_feature (966)..(966): n is a, c, g, or t
  misc_feature (969)..(970): n is a, c, g, or t
  misc_feature (975)..(975): n is a, c, g, or t
  misc_feature (977)..(977): n is a, c, g, or t
  misc_feature (979)..(980): n is a, c, g, or t
  misc_feature (983)..(983): n is a, c, g, or t
  misc_feature (991)..(991): n is a, c, g, or t
  misc_feature (995)..(995): n is a, c, g, or t
  misc_feature (998)..(998): n is a, c, g, or t
  misc_feature (1000)..(1000): n is a, c, g, or t
  misc_feature (1002)..(1002): n is a, c, g, or t
  misc_feature (1007)..(1007): n is a, c, g, or t
  misc_feature (1014)..(1014): n is a, c, g, or t
  misc_feature (1017)..(1019): n is a, c, g, or t
  misc_feature (1024)..(1024): n is a, c, g, or t
  misc_feature (1026)..(1026): n is a, c, g, or t
  misc_feature (1031)..(1031): n is a, c, g, or t
  misc_feature (1035)..(1036): n is a, c, g, or t
  misc_feature (1038)..(1038): n is a, c, g, or t
  misc_feature (1041)..(1041): n is a, c, g, or t
  misc_feature (1049)..(1049): n is a, c, g, or t
  misc_feature (1051)..(1052): n is a, c, g, or t
  misc_feature (1054)..(1056): n is a, c, g, or t
  misc_feature (1060)..(1061): n is a, c, g, or t
  misc_feature (1065)..(1066): n is a, c, g, or t
  misc_feature (1070)..(1072): n is a, c, g, or t
  misc_feature (1075)..(1075): n is a, c, g, or t
  misc_feature (1080)..(1080): n is a, c, g, or t
  misc_feature (1084)..(1084): n is a, c, g, or t
  misc_feature (1087)..(1089): n is a, c, g, or t
  misc_feature (1095)..(1095): n is a, c, g, or t
  misc_feature (1097)..(1098): n is a, c, g, or t
  misc_feature (1105)..(1106): n is a, c, g, or t
  misc_feature (1108)..(1108): n is a, c, g, or t
  misc_feature (1111)..(1111): n is a, c, g, or t
  misc_feature (1115)..(1116): n is a, c, g, or t
  misc_feature (1118)..(1119): n is a, c, g, or t
  misc_feature (1121)..(1121): n is a, c, g, or t
  misc_feature (1123)..(1123): n is a, c, g, or t
  misc_feature (1130)..(1130): n is a, c, g, or t
  misc_feature (1133)..(1137): n is a, c, g, or t
  misc_feature (1147)..(1147): n is a, c, g, or t
  misc_feature (1149)..(1149): n is a, c, g, or t
  misc_feature (1151)..(1152): n is a, c, g, or t
  misc_feature (1154)..(1157): n is a, c, g, or t
  misc_feature (1159)..(1159): n is a, c, g, or t
  misc_feature (1167)..(1168): n is a, c, g, or t
  misc_feature (1172)..(1172): n is a, c, g, or t
  misc_feature (1177)..(1177): n is a, c, g, or t
  misc_feature (1182)..(1182): n is a, c, g, or t
  misc_feature (1184)..(1185): n is a, c, g, or t
  misc_feature (1187)..(1188): n is a, c, g, or t
  misc_feature (1192)..(1193): n is a, c, g, or t
  misc_feature (1207)..(1207): n is a, c, g, or t
  misc_feature (1213)..(1213): n is a, c, g, or t
  misc_feature (1217)..(1217): n is a, c, g, or t
  misc_feature (1220)..(1220): n is a, c, g, or t
  misc_feature (1227)..(1227): n is a, c, g, or t
  misc_feature (1233)..(1233): n is a, c, g, or t
  misc_feature (1235)..(1236): n is a, c, g, or t
  misc_feature (1239)..(1239): n is a, c, g, or t
  misc_feature (1242)..(1242): n is a, c, g, or t
  misc_feature (1250)..(1250): n is a, c, g, or t
  misc_feature (1252)..(1252): n is a, c, g, or t
  misc_feature (1254)..(1255): n is a, c, g, or t
  misc_feature (1261)..(1261): n is a, c, g, or t
  misc_feature (1263)..(1263): n is a, c, g, or t
  misc_feature (1267)..(1267): n is a, c, g, or t
  misc_feature (1276)..(1276): n is a, c, g, or t
  misc_feature (1279)..(1279): n is a, c, g, or t
  misc_feature (1282)..(1282): n is a, c, g, or t
  misc_feature (1289)..(1289): n is a, c, g, or t
  misc_feature (1295)..(1295): n is a, c, g, or t
  misc_feature (1299)..(1299): n is a, c, g, or t
  misc_feature (1303)..(1303): n is a, c, g, or t
  misc_feature (1307)..(1307): n is a, c, g, or t
  misc_feature (1310)..(1311): n is a, c, g, or t
  misc_feature (1313)..(1313): n is a, c, g, or t
  misc_feature (1331)..(1331): n is a, c, g, or t
  misc_feature (1333)..(1333): n is a, c, g, or t
  misc_feature (1335)..(1337): n is a, c, g, or t
  misc_feature (1339)..(1339): n is a, c, g, or t
  misc_feature (1343)..(1343): n is a, c, g, or t
  misc_feature (1348)..(1348): n is a, c, g, or t
  misc_feature (1355)..(1356): n is a, c, g, or t
  misc_feature (1359)..(1362): n is a, c, g, or t
  misc_feature (1371)..(1372): n is a, c, g, or t
  misc_feature (1379)..(1381): n is a, c, g, or t
  misc_feature (1385)..(1385): n is a, c, g, or t
  misc_feature (1389)..(1389): n is a, c, g, or t
  misc_feature (1394)..(1394): n is a, c, g, or t
  misc_feature (1396)..(1396): n is a, c, g, or t
  misc_feature (1399)..(1399): n is a, c, g, or t
  misc_feature (1401)..(1401): n is a, c, g, or t
  misc_feature (1408)..(1408): n is a, c, g, or t
  misc_feature (1411)..(1411): n is a, c, g, or t
  misc_feature (1414)..(1414): n is a, c, g, or t
  misc_feature (1416)..(1416): n is a, c, g, or t
  misc_feature (1419)..(1419): n is a, c, g, or t
  misc_feature (1421)..(1421): n is a, c, g, or t
  misc_feature (1431)..(1431): n is a, c, g, or t
  misc_feature (1435)..(1436): n is a, c, g, or t
  misc_feature (1438)..(1438): n is a, c, g, or t
  misc_feature (1440)..(1440): n is a, c, g, or t
  misc_feature (1443)..(1443): n is a, c, g, or t
  misc_feature (1445)..(1445): n is a, c, g, or t
  misc_feature (1448)..(1448): n is a, c, g, or t
  misc_feature (1450)..(1451): n is a, c, g, or t
  misc_feature (1458)..(1458): n is a, c, g, or t
  misc_feature (1460)..(1461): n is a, c, g, or t
  misc_feature (1468)..(1468): n is a, c, g, or t
  misc_feature (1475)..(1475): n is a, c, g, or t
  misc_feature (1477)..(1477): n is a, c, g, or t
  misc_feature (1483)..(1484): n is a, c, g, or t
  misc_feature (1486)..(1489): n is a, c, g, or t
  misc_feature (1498)..(1498): n is a, c, g, or t
  misc_feature (1506)..(1508): n is a, c, g, or t
  misc_feature (1510)..(1510): n is a, c, g, or t
  misc_feature (1518)..(1519): n is a, c, g, or t
  misc_feature (1523)..(1523): n is a, c, g, or t
  misc_feature (1526)..(1526): n is a, c, g, or t
  misc_feature (1529)..(1530): n is a, c, g, or t
  misc_feature (1533)..(1533): n is a, c, g, or t
  misc_feature (1535)..(1535): n is a, c, g, or t
  misc_feature (1541)..(1541): n is a, c, g, or t
  misc_feature (1543)..(1543): n is a, c, g, or t
  misc_feature (1547)..(1547): n is a, c, g, or t
  misc_feature (1564)..(1564): n is a, c, g, or t
  misc_feature (1568)..(1568): n is a, c, g, or t
  misc_feature (1573)..(1575): n is a, c, g, or t
  misc_feature (1580)..(1580): n is a, c, g, or t
  misc_feature (1584)..(1584): n is a, c, g, or t
  misc_feature (1587)..(1587): n is a, c, g, or t
  misc_feature (1593)..(1593): n is a, c, g, or t
  misc_feature (1595)..(1595): n is a, c, g, or t
  misc_feature (1599)..(1600): n is a, c, g, or t
  misc_feature (1603)..(1603): n is a, c, g, or t
  misc_feature (1606)..(1608): n is a, c, g, or t
  misc_feature (1610)..(1612): n is a, c, g, or t
  misc_feature (1614)..(1614): n is a, c, g, or t
  misc_feature (1618)..(1619): n is a, c, g, or t
  misc_feature (1633)..(1633): n is a, c, g, or t
  misc_feature (1636)..(1636): n is a, c, g, or t
  misc_feature (1639)..(1639): n is a, c, g, or t
  misc_feature (1645)..(1645): n is a, c, g, or t
  misc_feature (1648)..(1650): n is a, c, g, or t
  misc_feature (1658)..(1658): n is a, c, g, or t
gnnanaatagagagaattactatgagaggatcgcatcaccatcaccatcacgggatcctatttaggtgacactatagaatcgtcgacccacgcgttccgcgctccccggcgcccgccccgcccgcccgccactccgggggggtctccgccgccgccgccgccggaaggagccgccatttgccaccgccgagcgcacgggccgagccaagcctgatcccggagccggagggggactgggaccgagagaacggcgatggggggcggccccgccgcangaggacccgggcgcgnanncccgggggcncggnncgntncnanccananccgcggggtgnggntcnctganccnncctcnntgnaatccngnactgtnnangncncgcancacantngnnnnnnntnnnngncgctaatacnnttcntnatccannatagatnaanntcanaacnnnagcttgatgnctnanttanctnaannnatnnttntnncttntnnnaaananaatncctnttnnnccannactnactattnnncatctaaataataaacanntntannaatntnttntagannattctgctnacctacnantntnaagcnatttcnatntgnnnnnntatcntnnnnatntanancantnnntnttantnaaanannatttnnattnttcanaannattnttttnnnctatnntannancnaaanccnctnncntnntnananttntanatnnnnannttatctncaaattnatntattnannnntcnaccnctatccnacnnntntattnaanatannctnacntnntncaanngnangtannantttattntanntctnatanantntngacatnaatcantaannntacgantattacatntaagatatcnatanatnataattattatnataaattanatnatnnnncaantanncnacntttatatgncntactatnntnaanntctantnanntanaatatcanttcntancntntaagnatttacntcnnncaatncnatcantttnnantantcatcatncnncnnntatnncttnntgannnaanaattnaatnatnnntttatnannttctaanntntantaannanntnantaacacnttnnnnnattttataanananntnnnntnttattatnncctntactntactnanntnnacanncaacatatctccanaataantaanagntaaattntatatntnncanttnttccttanananncactcnantctncaaaatttnttnttntcttacncattanattntatnatanatnntntctatttatctttagatnanannntntatngttanttaaaanntannnntttttattnntatttannncttnacantattntntantnatacttnaantantnttntntcaattatcnttcnntntntantnatnannatatatntnnatatttnttatctntnataacnngnnnnatctacaantatctctnnncnctactatnntatncanttnnacncnatagtncntacnacattaattattataantatnataannntatgnaatnaanttatantnatannctngannntnnnantctnncatattactattcnatnatntaatanttnnnttaatatn

SEQ ID NO: 961 - DNA, 1340 bp, Homo Sapiens
  misc_feature (867)..(867): n is a, c, g, or t
  misc_feature (943)..(943): n is a, c, g, or t
  misc_feature (969)..(969): n is a, c, g, or t
  misc_feature (974)..(974): n is a, c, g, or t
  misc_feature (989)..(989): n is a, c, g, or t
  misc_feature (993)..(993): n is a, c, g, or t
  misc_feature (1005)..(1005): n is a, c, g, or t
  misc_feature (1010)..(1010): n is a, c, g, or t
  misc_feature (1015)..(1015): n is a, c, g, or t
  misc_feature (1020)..(1020): n is a, c, g, or t
  misc_feature (1033)..(1033): n is a, c, g, or t
  misc_feature (1043)..(1043): n is a, c, g, or t
  misc_feature (1051)..(1051): n is a, c, g, or t
  misc_feature (1053)..(1053): n is a, c, g, or t
  misc_feature (1056)..(1056): n is a, c, g, or t
  misc_feature (1066)..(1066): n is a, c, g, or t
  misc_feature (1073)..(1073): n is a, c, g, or t
  misc_feature (1089)..(1089): n is a, c, g, or t
  misc_feature (1093)..(1093): n is a, c, g, or t
  misc_feature (1097)..(1097): n is a, c, g, or t
  misc_feature (1106)..(1106): n is a, c, g, or t
  misc_feature (1109)..(1109): n is a, c, g, or t
  misc_feature (1111)..(1111): n is a, c, g, or t
  misc_feature (1113)..(1113): n is a, c, g, or t
  misc_feature (1120)..(1120): n is a, c, g, or t
  misc_feature (1125)..(1126): n is a, c, g, or t
  misc_feature (1134)..(1134): n is a, c, g, or t
  misc_feature (1136)..(1136): n is a, c, g, or t
  misc_feature (1139)..(1140): n is a, c, g, or t
  misc_feature (1150)..(1150): n is a, c, g, or t
  misc_feature (1155)..(1155): n is a, c, g, or t
  misc_feature (1165)..(1165): n is a, c, g, or t
  misc_feature (1173)..(1173): n is a, c, g, or t
  misc_feature (1185)..(1185): n is a, c, g, or t
  misc_feature (1187)..(1187): n is a, c, g, or t
  misc_feature (1191)..(1191): n is a, c, g, or t
  misc_feature (1195)..(1196): n is a, c, g, or t
  misc_feature (1207)..(1207): n is a, c, g, or t
  misc_feature (1213)..(1213): n is a, c, g, or t
  misc_feature (1215)..(1215): n is a, c, g, or t
  misc_feature (1228)..(1228): n is a, c, g, or t
  misc_feature (1243)..(1244): n is a, c, g, or t
  misc_feature (1246)..(1247): n is a, c, g, or t
  misc_feature (1254)..(1261): n is a, c, g, or t
  misc_feature (1265)..(1265): n is a, c, g, or t
  misc_feature (1267)..(1267): n is a, c, g, or t
  misc_feature (1276)..(1276): n is a, c, g, or t
  misc_feature (1279)..(1279): n is a, c, g, or t
  misc_feature (1283)..(1283): n is a, c, g, or t
  misc_feature (1285)..(1285): n is a, c, g, or t
  misc_feature (1288)..(1289): n is a, c, g, or t
  misc_feature (1291)..(1295): n is a, c, g, or t
  misc_feature (1319)..(1321): n is a, c, g, or t
  misc_feature (1324)..(1326): n is a, c, g, or t
tagagaaattaactatgagaggatcgcatcaccatcaccatcacggatcctatttaggtgacactatagaatcgtcgacccacgcgtccgttttccacctgatcccttctgggctggcttctcctgaccccggctatgtgcctccacccctcgccctaaccccagtcccggaacagcctgcagcagggggacgtggacggggcccagcgtctgggccgggtagccaagctcttaagcatcgtggcgctggtggggggagtcctcatcatcatcgcctcctgcgtcatcaacttaggcggtgagtgggggcttgggacaggcaggggaggaatggaagggttggcaagggcagctttactaacccctgcccctgctctctcctgtctgtcctccttacctctcctttgtctctccttgtctccccctccccccgtctgtccttccctctcctctcccacagtgtataagtgaggggctctgccccgcatcccaagacttttcttcctgttgggagctgccttgggcccatccctcccctggggggagcccaactgatggccctggcccccacccctaaggaccaagggagcctgagcggccttgtttacagcttctgtcctgctcctgcatcttgccaggctcctctgccaactgtaggcctgcctcatccctgcactggttccaacctccctgcactaatgcctgcatcccctccggcctcttggccccctatccctgcacttctggaaacctccctgcactctggaaacctccctgaacacctccccaactctgcgctctcagcctccctgcatctctcctggcctccctgcacttcttccagccccccaaattctctggacctcnaccctggcctcctcctcccaactttcattgtcttggcatctctcaaccctcagtcctctcttccttccttctttancatctccctttcctctcaaggtccgnccccnttcctcttcctgccncctnatctcccttaanaatcnttttntcaanctcccgtcaacgnttaatttggnaaattganancanttaaaaaagnttggggnaaggaaaaatgttggnaaanggcncccaacccnagntngnaatgttnttggnnggaaaccnanggnngaaaaccaangggcntggaaggtcnaaaattgnaaaccggccctnangggnaacnngggaagggggnaaaaangntccaaaacccccnggaaaaaaaaagaanngnntaacctnnnnnnnnggananaaccccccnggntttnanccnncnnnnntttttttaaaggggggaaaaattnnnggnnnaaaaaaaaaaaaaa

SEQ ID NO: 962 - DNA, 1372 bp, Homo Sapiens
  misc_feature (4)..(4): n is a, c, g, or t
  misc_feature (837)..(837): n is a, c, g, or t
  misc_feature (855)..(855): n is a, c, g, or t
  misc_feature (864)..(864): n is a, c, g, or t
  misc_feature (925)..(925): n is a, c, g, or t
  misc_feature (934)..(934): n is a, c, g, or t
  misc_feature (939)..(939): n is a, c, g, or t
  misc_feature (942)..(943): n is a, c, g, or t
  misc_feature (945)..(945): n is a, c, g, or t
  misc_feature (948)..(961): n is a, c, g, or t
  misc_feature (963)..(964): n is a, c, g, or t
  misc_feature (966)..(967): n is a, c, g, or t
  misc_feature (970)..(973): n is a, c, g, or t
  misc_feature (975)..(975): n is a, c, g, or t
  misc_feature (978)..(981): n is a, c, g, or t
  misc_feature (984)..(984): n is a, c, g, or t
  misc_feature (986)..(988): n is a, c, g, or t
  misc_feature (990)..(999): n is a, c, g, or t
  misc_feature (1011)..(1011): n is a, c, g, or t
  misc_feature (1020)..(1023): n is a, c, g, or t
  misc_feature (1029)..(1029): n is a, c, g, or t
  misc_feature (1040)..(1040): n is a, c, g, or t
  misc_feature (1045)..(1045): n is a, c, g, or t
  misc_feature (1055)..(1060): n is a, c, g, or t
  misc_feature (1068)..(1068): n is a, c, g, or t
  misc_feature (1070)..(1070): n is a, c, g, or t
  misc_feature (1077)..(1077): n is a, c, g, or t
  misc_feature (1080)..(1081): n is a, c, g, or t
  misc_feature (1087)..(1087): n is a, c, g, or t
  misc_feature (1112)..(1112): n is a, c, g, or t
  misc_feature (1114)..(1114): n is a, c, g, or t
  misc_feature (1125)..(1125): n is a, c, g, or t
  misc_feature (1145)..(1145): n is a, c, g, or t
  misc_feature (1148)..(1148): n is a, c, g, or t
  misc_feature (1155)..(1155): n is a, c, g, or t
  misc_feature (1160)..(1160): n is a, c, g, or t
  misc_feature (1165)..(1166): n is a, c, g, or t
  misc_feature (1177)..(1178): n is a, c, g, or t
  misc_feature (1197)..(1197): n is a, c, g, or t
  misc_feature (1213)..(1215): n is a, c, g, or t
  misc_feature (1217)..(1217): n is a, c, g, or t
  misc_feature (1222)..(1222): n is a, c, g, or t
  misc_feature (1224)..(1226): n is a, c, g, or t
  misc_feature (1229)..(1229): n is a, c, g, or t
  misc_feature (1241)..(1243): n is a, c, g, or t
  misc_feature (1248)..(1249): n is a, c, g, or t
  misc_feature (1251)..(1251): n is a, c, g, or t
  misc_feature (1255)..(1256): n is a, c, g, or t
  misc_feature (1258)..(1258): n is a, c, g, or t
  misc_feature (1260)..(1261): n is a, c, g, or t
  misc_feature (1263)..(1263): n is a, c, g, or t
  misc_feature (1271)..(1271): n is a, c, g, or t
  misc_feature (1276)..(1276): n is a, c, g, or t
  misc_feature (1278)..(1279): n is a, c, g, or t
  misc_feature (1282)..(1282): n is a, c, g, or t
  misc_feature (1295)..(1295): n is a, c, g, or t
  misc_feature (1307)..(1307): n is a, c, g, or t
  misc_feature (1310)..(1310): n is a, c, g, or t
  misc_feature (1315)..(1315): n is a, c, g, or t
  misc_feature (1328)..(1329): n is a, c, g, or t
  misc_feature (1340)..(1340): n is a, c, g, or t
  misc_feature (1348)..(1348): n is a, c, g, or t
  misc_feature (1350)..(1350): n is a, c, g, or t
  misc_feature (1359)..(1359): n is a, c, g, or t
  misc_feature (1365)..(1365): n is a, c, g, or t
  misc_feature (1368)..(1368): n is a, c, g, or t
aaantagagaaattactatgagaggatcgcatcaccatcaccatcacggatcctatttaggtgacactatagaatcgtcgacccacgcgtccgtgcatgtcatggccgcctccatggcccggggaggcgtgagtgccagggttctgctgcaggctgccaggggcacctggtggaacagacctgggggcacttccgggtcgggggagggggtggcgctggggacaaccagaaagtttcaagcgacaggctcgcgcccggcgggagaggaggacgcgggcggcccggagcggcccggggacgtggtgaacgtggtgttcgtagaccgctcaggccagcggatcccagtgagtggcagagtcggggacaatgttcttcacctggcccagcgccacggggtggacctggaaggggcctgtgaagcctccctggcctgctccacctgccatgtgtatgtgagtgaagaccacctggatctcctgcctcctcccgaggagagggaagacgacatgctagacatggcccccctcctccaggagaactcgcggctgggctgccagattgtgctgacaccggagctggaaggagcggaattcaccctgcccaagatcaccaggaacttctacgtggatggccatgtccccaagccccactgacatgaacacctggaccattccacattgccatggccccagggcccagattgagggaatagccaggtgccagccctgcccagagtgcggacaggcccgggagagacgtggaagcccctgtgaaggacaacacccctgcttgggagagagtcccatgtccaggctctggtggggacagggcccctantggggtggccttccccangcccctganaatcagggtttgaagtaagaagtggactcatattggagctgcattaattcgattaacccgnaaaaaaaanaaaanaannanatnnnnnnnnnnnnnnannannaannnntnaannnnaanannnannnnnnnnnnggggggcccccnccctaaaannnntcttantaaccttaatnaactnaacttggaannnnnnttaaaaancnaaaaatnacnncaaaantcctttggaattttttcaaaacctngnttcccccgggnttttttttttgggaaaatcnaanaatttgngaaanttttnnggacctaggannctaaatggaaaaaaatccntggaaacccccctttnnntncccangnnnttnaaaaaaatttannnttttnncntttnnananntnaaaaaaanctttntnnaanatcccttttaaancaaaaaaaaaanaanttttnccctttttttttnncccaaaaaccnccaatttnanaaaaaagtntttttntantttc

SEQ ID NO: 963 - DNA, 1382 bp, Homo Sapiens
  misc_feature (894)..(894): n is a, c, g, or t
  misc_feature (896)..(896): n is a, c, g, or t
  misc_feature (915)..(915): n is a, c, g, or t
  misc_feature (940)..(940): n is a, c, g, or t
  misc_feature (961)..(961): n is a, c, g, or t
  misc_feature (971)..(971): n is a, c, g, or t
  misc_feature (983)..(983): n is a, c, g, or t
  misc_feature (991)..(991): n is a, c, g, or t
  misc_feature (998)..(999): n is a, c, g, or t
  misc_feature (1019)..(1019): n is a, c, g, or t
  misc_feature (1049)..(1049): n is a, c, g, or t
  misc_feature (1057)..(1058): n is a, c, g, or t
  misc_feature (1062)..(1062): n is a, c, g, or t
  misc_feature (1066)..(1066): n is a, c, g, or t
  misc_feature (1078)..(1078): n is a, c, g, or t
  misc_feature (1083)..(1083): n is a, c, g, or t
  misc_feature (1089)..(1089): n is a, c, g, or t
  misc_feature (1094)..(1094): n is a, c, g, or t
  misc_feature (1097)..(1097): n is a, c, g, or t
  misc_feature (1110)..(1110): n is a, c, g, or t
  misc_feature (1117)..(1118): n is a, c, g, or t
  misc_feature (1122)..(1123): n is a, c, g, or t
  misc_feature (1127)..(1128): n is a, c, g, or t
  misc_feature (1135)..(1135): n is a, c, g, or t
  misc_feature (1139)..(1139): n is a, c, g, or t
  misc_feature (1142)..(1142): n is a, c, g, or t
  misc_feature (1144)..(1144): n is a, c, g, or t
  misc_feature (1159)..(1159): n is a, c, g, or t
  misc_feature (1174)..(1174): n is a, c, g, or t
  misc_feature (1177)..(1177): n is a, c, g, or t
  misc_feature (1182)..(1182): n is a, c, g, or t
  misc_feature (1186)..(1186): n is a, c, g, or t
  misc_feature (1195)..(1197): n is a, c, g, or t
  misc_feature (1200)..(1200): n is a, c, g, or t
  misc_feature (1214)..(1214): n is a, c, g, or t
  misc_feature (1218)..(1218): n is a, c, g, or t
  misc_feature (1222)..(1222): n is a, c, g, or t
  misc_feature (1227)..(1227): n is a, c, g, or t
  misc_feature (1235)..(1235): n is a, c, g, or t
  misc_feature (1242)..(1242): n is a, c, g, or t
  misc_feature (1246)..(1246): n is a, c, g, or t
  misc_feature (1250)..(1250): n is a, c, g, or t
  misc_feature (1254)..(1254): n is a, c, g, or t
  misc_feature (1261)..(1261): n is a, c, g, or t
  misc_feature (1270)..(1271): n is a, c, g, or t
  misc_feature (1277)..(1277): n is a, c, g, or t
  misc_feature (1284)..(1285): n is a, c, g, or t
  misc_feature (1294)..(1296): n is a, c, g, or t
  misc_feature (1299)..(1299): n is a, c, g, or t
  misc_feature (1303)..(1303): n is a, c, g, or t
  misc_feature (1306)..(1308): n is a, c, g, or t
  misc_feature (1310)..(1311): n is a, c, g, or t
  misc_feature (1314)..(1314): n is a, c, g, or t
  misc_feature (1316)..(1317): n is a, c, g, or t
  misc_feature (1323)..(1323): n is a, c, g, or t
  misc_feature (1328)..(1328): n is a, c, g, or t
  misc_feature (1332)..(1332): n is a, c, g, or t
  misc_feature (1335)..(1335): n is a, c, g, or t
  misc_feature (1339)..(1339): n is a, c, g, or t
  misc_feature (1343)..(1343): n is a, c, g, or t
  misc_feature (1345)..(1346): n is a, c, g, or t
  misc_feature (1348)..(1348): n is a, c, g, or t
  misc_feature (1352)..(1352): n is a, c, g, or t
  misc_feature (1358)..(1358): n is a, c, g, or t
  misc_feature (1360)..(1360): n is a, c, g, or t
  misc_feature (1362)..(1363): n is a, c, g, or t
  misc_feature (1365)..(1365): n is a, c, g, or t
  misc_feature (1369)..(1369): n is a, c, g, or t
  misc_feature (1376)..(1378): n is a, c, g, or t
tagagaaattactatgagaggatcgcatcaccatcaccatcacggatcctatttaggtgacactatagaatcgtcgacccacgcgtccggcctaggggagagtgagaaaaatggcaacatcgttgagaccccaattcctggatgcgatattaatgggaagtatgaaaataattataatgctgtcttcaaccttttgccccacactgaaaaccatagcccagagcacaaattcctctgtgctctctgtgtttctgcactgtgcagacagctagaagcagccagtttacaggccatcccaactgagaggattgtgaactcctctcagcttaaagcagcagtgacacctgaattgtgtcctgacgtgactatttggggagtggcgatgctgagacacatgttacagcttcagtgtaacgctcaggcgatgaccaccatacaacacacaggacctaaagggagcatcgttaccgacagcaggcaggtgcgccttgccacaggcatcttccctgttatcagcctcctgaaccactcctgtagccccaacaccagcgtgtccttcattagcactgtcgccaccatccgggcgtcacagcggattagaaaggggcaagagattctccactgctatgggcctcacaagagccggatgggggttgccgaaaggcagcagaagctgaggtctcagtatttctttgactgcgcctgtccagcttgtcaaactgaggcacacaggatggctgcagggcccaggtgggaagcattctgttgcaacagttgcggagcgcccatgcagggagatgacgtgctgcgctgtggcatcagatcttgtgcagaatccgccgtcagcagggaccacctggtctctcggttacaggacctacagcagcaggtcanantggcccaaaagcttctcanaaatggtgaactaaagcgagctgtncaccggctgtcggggtgccancgtgaccccnaaagcttcctgngggcaaancaccccnnggtgggaaaaatccccgganggcctggccccgggcctgggctgcctttangaaactgnnaaantccnccccccctctanaaagnaatctntgcgnggnggaagttcccccncgggccnncccnngttnnaaagggncctngancncttcaaattggcccnaattttttcaacggnttngcaancccnaaaccccgnnnccnaaaaaaaaactaanaagntttnccctnccctgggncccgggnaaanaaancccngaccccnaaaaaaaanncggttntggaatnnccccccccnnnggncccnttnnngnnccngnnattttnccccnaaanagncccngaancnntnaaantttttngncnnangggnccccccnnncccc

SEQ ID NO: 964 - DNA, 1361 bp, Homo Sapiens
  misc_feature (670)..(670): n is a, c, g, or t
  misc_feature (695)..(695): n is a, c, g, or t
  misc_feature (739)..(739): n is a, c, g, or t
  misc_feature (742)..(742): n is a, c, g, or t
  misc_feature (749)..(749): n is a, c, g, or t
  misc_feature (762)..(762): n is a, c, g, or t
  misc_feature (771)..(771): n is a, c, g, or t
  misc_feature (790)..(790): n is a, c, g, or t
  misc_feature (808)..(808): n is a, c, g, or t
  misc_feature (845)..(845): n is a, c, g, or t
  misc_feature (874)..(874): n is a, c, g, or t
  misc_feature (881)..(882): n is a, c, g, or t
  misc_feature (886)..(886): n is a, c, g, or t
  misc_feature (896)..(896): n is a, c, g, or t
  misc_feature (901)..(901): n is a, c, g, or t
  misc_feature (905)..(905): n is a, c, g, or t
  misc_feature (920)..(921): n is a, c, g, or t
  misc_feature (935)..(935): n is a, c, g, or t
  misc_feature (945)..(945): n is a, c, g, or t
  misc_feature (957)..(957): n is a, c, g, or t
  misc_feature (960)..(961): n is a, c, g, or t
  misc_feature (971)..(971): n is a, c, g, or t
  misc_feature (977)..(977): n is a, c, g, or t
  misc_feature (988)..(988): n is a, c, g, or t
  misc_feature (994)..(994): n is a, c, g, or t
  misc_feature (1000)..(1000): n is a, c, g, or t
  misc_feature (1020)..(1020): n is a, c, g, or t
  misc_feature (1023)..(1023): n is a, c, g, or t
  misc_feature (1044)..(1044): n is a, c, g, or t
  misc_feature (1046)..(1046): n is a, c, g, or t
  misc_feature (1055)..(1055): n is a, c, g, or t
  misc_feature (1074)..(1074): n is a, c, g, or t
  misc_feature (1079)..(1079): n is a, c, g, or t
  misc_feature (1085)..(1085): n is a, c, g, or t
  misc_feature (1087)..(1087): n is a, c, g, or t
  misc_feature (1092)..(1093): n is a, c, g, or t
  misc_feature (1095)..(1095): n is a, c, g, or t
  misc_feature (1107)..(1107): n is a, c, g, or t
  misc_feature (1112)..(1114): n is a, c, g, or t
  misc_feature (1118)..(1118): n is a, c, g, or t
  misc_feature (1132)..(1132): n is a, c, g, or t
  misc_feature (1149)..(1149): n is a, c, g, or t
  misc_feature (1159)..(1159): n is a, c, g, or t
  misc_feature (1162)..(1162): n is a, c, g, or t
  misc_feature (1168)..(1169): n is a, c, g, or t
  misc_feature (1173)..(1173): n is a, c, g, or t
  misc_feature (1176)..(1177): n is a, c, g, or t
  misc_feature (1180)..(1180): n is a, c, g, or t
  misc_feature (1187)..(1187): n is a, c, g, or t
  misc_feature (1192)..(1192): n is a, c, g, or t
  misc_feature (1195)..(1196): n is a, c, g, or t
  misc_feature (1200)..(1200): n is a, c, g, or t
  misc_feature (1204)..(1204): n is a, c, g, or t
  misc_feature (1208)..(1209): n is a, c, g, or t
  misc_feature (1212)..(1213): n is a, c, g, or t
  misc_feature (1215)..(1215): n is a, c, g, or t
  misc_feature (1218)..(1218): n is a, c, g, or t
  misc_feature (1226)..(1226): n is a, c, g, or t
  misc_feature (1234)..(1234): n is a, c, g, or t
  misc_feature (1236)..(1238): n is a, c, g, or t
  misc_feature (1244)..(1244): n is a, c, g, or t
  misc_feature (1246)..(1246): n is a, c, g, or t
  misc_feature (1249)..(1249): n is a, c, g, or t
  misc_feature (1254)..(1254): n is a, c, g, or t
  misc_feature (1256)..(1256): n is a, c, g, or t
  misc_feature (1259)..(1261): n is a, c, g, or t
  misc_feature (1266)..(1266): n is a, c, g, or t
  misc_feature (1269)..(1271): n is a, c, g, or t
  misc_feature (1275)..(1275): n is a, c, g, or t
  misc_feature (1280)..(1280): n is a, c, g, or t
  misc_feature (1285)..(1286): n is a, c, g, or t
  misc_feature (1294)..(1297): n is a, c, g, or t
  misc_feature (1305)..(1307): n is a, c, g, or t
  misc_feature (1312)..(1312): n is a, c, g, or t
  misc_feature (1319)..(1319): n is a, c, g, or t
  misc_feature (1323)..(1327): n is a, c, g, or t
  misc_feature (1332)..(1332): n is a, c, g, or t
  misc_feature (1334)..(1337): n is a, c, g, or t
  misc_feature (1343)..(1343): n is a, c, g, or t
  misc_feature (1345)..(1345): n is a, c, g, or t
  misc_feature (1347)..(1347): n is a, c, g, or t
  misc_feature (1349)..(1349): n is a, c, g, or t
  misc_feature (1352)..(1353): n is a, c, g, or t
  misc_feature (1355)..(1356): n is a, c, g, or t
tagagaaattactatgagaggatcgcatcaccatcaccatcacggatcctatttaggtgacactatagaatcgtcgacccacgcgtccgtggctgacagcctgaagatccgcggcaccctgaagagctggaccaagctgtggtgcgtgctgaagccgggggtgctgctcatctacaagacgcccaaggtgggccagtgggtgggcacggtgctgctgcactgctgcgagctcatcgagcggccctccaagaaggacggcttctgcttcaagctcttccacccgctggatcagtccgtctgggccgtgaagggccccaaaggtgagagcgtgggctccatcacacagcccctgcccagcagctacctgatcttcagggccgcctccgagtcagatggtcgctgctggctggacgccctggagctggccctgcgctgctctagcctactgagactgggcacctgcaagccgggccgagacggggagccagggacctcgccagacgcatcaccctcatcgctctgtgggctgccagcctcagccactgtccacccagaccaagacctgttcccactgaacgggtcttccctggagaacgatgcattctcagacaagtcggagagagagaaccctgaggagtcagataccgagacccaggaccatagccggaanacggagagtggcagcgaccagtcanagacccctggggccccggtgcggagagggaccacctatgtggancangtccagnaagaactgggggnaactgggcnaagcgtcccaggtggaaanagtgtcaaagaaaacaanaatctgatgtggaccctgctgaaacaactacggccangcatggacctgtcccgcgtggtgctaccnacgtttnntaantggaaccccncctcntttntgaaaaaacttttcnnaataataataacangcaaaactgnttttccaagggntgnnggggaaaaanaattcntaaacccccanaaaacntggggntgcgggggaacttttttggnttntaaaaaaaaccccaagggaantnaaaaacccntaaaaccccctcccggggnaaaanctttcncnttttnntngtttcccccccnaaaannnaaancccccaatttttanaaaaaaaaaaaggggtncccccccccnccnggtttnntttntcnnttnaaaaaanaaaanaanntttnttcntttnnggnncntcnccccaaancccttttntnnnaaaccntnttngcctntngannnaaaanccnnntttntttanaaaannaaaataannnnttttttcnnnccctnaaaaaantttnnnnnaaaancnnnngggggnanancnccnngnnaaaaa

SEQ ID NO: 965 - DNA, 1384 bp, Homo Sapiens
  misc_feature (874)..(874): n is a, c, g, or t
  misc_feature (886)..(886): n is a, c, g, or t
  misc_feature (901)..(901): n is a, c, g, or t
  misc_feature (927)..(927): n is a, c, g, or t
  misc_feature (936)..(936): n is a, c, g, or t
  misc_feature (946)..(946): n is a, c, g, or t
  misc_feature (972)..(972): n is a, c, g, or t
  misc_feature (984)..(984): n is a, c, g, or t
  misc_feature (989)..(989): n is a, c, g, or t
  misc_feature (1011)..(1011): n is a, c, g, or t
  misc_feature (1017)..(1017): n is a, c, g, or t
  misc_feature (1028)..(1028): n is a, c, g, or t
  misc_feature (1030)..(1031): n is a, c, g, or t
  misc_feature (1033)..(1033): n is a, c, g, or t
  misc_feature (1040)..(1040): n is a, c, g, or t
  misc_feature (1042)..(1042): n is a, c, g, or t
  misc_feature (1046)..(1046): n is a, c, g, or t
  misc_feature (1053)..(1053): n is a, c, g, or t
  misc_feature (1055)..(1055): n is a, c, g, or t
  misc_feature (1059)..(1059): n is a, c, g, or t
  misc_feature (1062)..(1062): n is a, c, g, or t
  misc_feature (1083)..(1083): n is a, c, g, or t
  misc_feature (1088)..(1088): n is a, c, g, or t
  misc_feature (1092)..(1092): n is a, c, g, or t
  misc_feature (1114)..(1115): n is a, c, g, or t
  misc_feature (1124)..(1124): n is a, c, g, or t
  misc_feature (1129)..(1129): n is a, c, g, or t
  misc_feature (1132)..(1132): n is a, c, g, or t
  misc_feature (1136)..(1136): n is a, c, g, or t
  misc_feature (1147)..(1147): n is a, c, g, or t
  misc_feature (1158)..(1158): n is a, c, g, or t
  misc_feature (1167)..(1168): n is a, c, g, or t
  misc_feature (1172)..(1172): n is a, c, g, or t
  misc_feature (1177)..(1177): n is a, c, g, or t
  misc_feature (1184)..(1184): n is a, c, g, or t
  misc_feature (1187)..(1187): n is a, c, g, or t
  misc_feature (1194)..(1195): n is a, c, g, or t
  misc_feature (1212)..(1212): n is a, c, g, or t
  misc_feature (1218)..(1218): n is a, c, g, or t
  misc_feature (1222)..(1222): n is a, c, g, or t
  misc_feature (1229)..(1229): n is a, c, g, or t
  misc_feature (1231)..(1231): n is a, c, g, or t
  misc_feature (1238)..(1238): n is a, c, g, or t
  misc_feature (1240)..(1240): n is a, c, g, or t
  misc_feature (1247)..(1250): n is a, c, g, or t
  misc_feature (1252)..(1253): n is a, c, g, or t
  misc_feature (1255)..(1257): n is a, c, g, or t
  misc_feature (1266)..(1266): n is a, c, g, or t
  misc_feature (1268)..(1268): n is a, c, g, or t
  misc_feature (1271)..(1271): n is a, c, g, or t
  misc_feature (1274)..(1276): n is a, c, g, or t
  misc_feature (1278)..(1281): n is a, c, g, or t
  misc_feature (1287)..(1290): n is a, c, g, or t
  misc_feature (1295)..(1295): n is a, c, g, or t
  misc_feature (1303)..(1303): n is a, c, g, or t
  misc_feature (1308)..(1308): n is a, c, g, or t
  misc_feature (1314)..(1315): n is a, c, g, or t
  misc_feature (1318)..(1318): n is a, c, g, or t
  misc_feature (1320)..(1321): n is a, c, g, or t
  misc_feature (1324)..(1324): n is a, c, g, or t
  misc_feature (1328)..(1328): n is a, c, g, or t
  misc_feature (1330)..(1332): n is a, c, g, or t
  misc_feature (1339)..(1340): n is a, c, g, or t
  misc_feature (1342)..(1342): n is a, c, g, or t
  misc_feature (1351)..(1351): n is a, c, g, or t
  misc_feature (1353)..(1354): n is a, c, g, or t
  misc_feature (1358)..(1358): n is a, c, g, or t
  misc_feature (1363)..(1363): n is a, c, g, or t
  misc_feature (1372)..(1372): n is a, c, g, or t
  misc_feature (1374)..(1374): n is a, c, g, or t
  misc_feature (1380)..(1380): n is a, c, g, or t
tagagaaattactatgagaggatcgcatcaccatcaccatcacggatcctatttaggtgacactatagaatcgtcgacccacgcgtccggggcgggggcagggcccggggcaggagcggggccggaccccaggcccagcatggcactggccccgcgtgacctggcgcaccccgcagagggaggaaggccgcatccagggccagctgaaccactcggactcatcgcagtacatccgcgagctcaaggaccagatcgaggagctgaaggccgaggtgagccggcgcggggatgccggggacaggcctgggtgtcgtcggcctgggacgagccgagcgcaggtgccttgcggaggatgcggctgggagggcggggcagaaggccggtccacgcctgcagcgccggtcccccgccccaggtgcggctgctgaagggcccgccgcccttcgaggacccgctggctttcgatgggctgagcctggcgcggcacttggacgaggactcgctgccgtcgtcggacgaggagctacttggcgtaggcgtgggcgctgccctgcaggacgcattgtaccctctgtccccgcgcgatgcgcgcttcttccgccgtctggagcggccggccaaggacagcgagggcagctcagacagcgacgccgatgagctggccgcgccctacagccagggtctggacaactgaggccatgcccagcgcgcccggagtcaggaggccgcagccgcggggggcgcccgggcagtccgcgttctgctccccacctgccgcacttgacaaactacgcgccctctgtggctcggccacccctaaagcgaggcccggcgaaggcaacgcaaaaggtagggtccgacctgggctcctcanggcccggggcangctctctctccccancagtgtttacccatcttggtctgtanccctccggnccttctggcnttccaggggtgcctggaagggctgantgcttttttaanagganggcaaaagggcagggaaaaaanaacccnaaagttcccancnntnaatgaanangcancttccantntctnggnaggttttcttttttggaaaangggcnaaanttttttggaaattttttagaanntacccaaanccttnaanaaanaaaacccccantttttgggttngaatttaanncccnaaaanttttttnggnaaaaaannaacctttaaaaaccctngccttntttnggaaaananccccttngnaaaaaannnnanncnnnttttttttntnggnaannncnnnncccttnnnnaaaanaattcccntttantttggnnccntnnaanaatntnnnaaaaaanncnttttttttngnnaaanttttnaaaaaaaancntccccntccc

SEQ ID NO: 966 - DNA, 1389 bp, Homo Sapiens
  misc_feature (1)..(1): n is a, c, g, or t
  misc_feature (380)..(380): n is a, c, g, or t
  misc_feature (758)..(758): n is a, c, g, or t
  misc_feature (802)..(802): n is a, c, g, or t
  misc_feature (842)..(842): n is a, c, g, or t
  misc_feature (869)..(869): n is a, c, g, or t
  misc_feature (894)..(894): n is a, c, g, or t
  misc_feature (922)..(922): n is a, c, g, or t
  misc_feature (929)..(929): n is a, c, g, or t
  misc_feature (944)..(944): n is a, c, g, or t
  misc_feature (947)..(947): n is a, c, g, or t
  misc_feature (983)..(983): n is a, c, g, or t
  misc_feature (1012)..(1012): n is a, c, g, or t
  misc_feature (1014)..(1014): n is a, c, g, or t
  misc_feature (1019)..(1019): n is a, c, g, or t
  misc_feature (1026)..(1027): n is a, c, g, or t
  misc_feature (1036)..(1036): n is a, c, g, or t
  misc_feature (1038)..(1038): n is a, c, g, or t
  misc_feature (1051)..(1052): n is a, c, g, or t
  misc_feature (1057)..(1057): n is a, c, g, or t
  misc_feature (1067)..(1067): n is a, c, g, or t
  misc_feature (1069)..(1069): n is a, c, g, or t
  misc_feature (1080)..(1080): n is a, c, g, or t
  misc_feature (1084)..(1084): n is a, c, g, or t
  misc_feature (1093)..(1093): n is a, c, g, or t
  misc_feature (1100)..(1100): n is a, c, g, or t
  misc_feature (1110)..(1111): n is a, c, g, or t
  misc_feature (1124)..(1124): n is a, c, g, or t
  misc_feature (1129)..(1129): n is a, c, g, or t
  misc_feature (1134)..(1134): n is a, c, g, or t
  misc_feature (1162)..(1162): n is a, c, g, or t
  misc_feature (1165)..(1165): n is a, c, g, or t
  misc_feature (1167)..(1168): n is a, c, g, or t
  misc_feature (1170)..(1170): n is a, c, g, or t
  misc_feature (1173)..(1175): n is a, c, g, or t
  misc_feature (1177)..(1177): n is a, c, g, or t
  misc_feature (1180)..(1180): n is a, c, g, or t
  misc_feature (1184)..(1184): n is a, c, g, or t
  misc_feature (1186)..(1189): n is a, c, g, or t
  misc_feature (1200)..(1200): n is a, c, g, or t
  misc_feature (1206)..(1209): n is a, c, g, or t
  misc_feature (1211)..(1211): n is a, c, g, or t
  misc_feature (1213)..(1213): n is a, c, g, or t
  misc_feature (1216)..(1216): n is a, c, g, or t
  misc_feature (1220)..(1220): n is a, c, g, or t
  misc_feature (1222)..(1222): n is a, c, g, or t
  misc_feature (1227)..(1227): n is a, c, g, or t
  misc_feature (1229)..(1229): n is a, c, g, or t
  misc_feature (1233)..(1233): n is a, c, g, or t
  misc_feature (1236)..(1236): n is a, c, g, or t
  misc_feature (1239)..(1239): n is a, c, g, or t
  misc_feature (1244)..(1244): n is a, c, g, or t
  misc_feature (1250)..(1250): n is a, c, g, or t
  misc_feature (1267)..(1267): n is a, c, g, or t
  misc_feature (1271)..(1272): n is a, c, g, or t
  misc_feature (1274)..(1275): n is a, c, g, or t
  misc_feature (1280)..(1280): n is a, c, g, or t
  misc_feature (1285)..(1286): n is a, c, g, or t
  misc_feature (1288)..(1288): n is a, c, g, or t
  misc_feature (1295)..(1295): n is a, c, g, or t
  misc_feature (1307)..(1308): n is a, c, g, or t
  misc_feature (1314)..(1315): n is a, c, g, or t
  misc_feature (1318)..(1321): n is a, c, g, or t
  misc_feature (1325)..(1325): n is a, c, g, or t
  misc_feature (1327)..(1327): n is a, c, g, or t
  misc_feature (1334)..(1334): n is a, c, g, or t
  misc_feature (1336)..(1337): n is a, c, g, or t
  misc_feature (1341)..(1343): n is a, c, g, or t
  misc_feature (1345)..(1346): n is a, c, g, or t
  misc_feature (1356)..(1356): n is a, c, g, or t
  misc_feature (1359)..(1361): n is a, c, g, or t
  misc_feature (1366)..(1368): n is a, c, g, or t
  misc_feature (1389)..(1389): n is a, c, g, or t
naaatagagaaattactatgagaggatcgcatcaccatcaccatcacggatcctatttaggtgacactatagaatcgtcgacccacgcgtccgcccacgcgtccgccagaactgaggcttggctggactgtcccccgactccagtgctgcctgaggggcgccggagccactcggcctttggctacaatggggagctgtacatctttggtggttataatgcaaggctgaaccggcacttccatgacctctggaagtttaatcctgtgtcctttacctggaaaaagattgaaccgaaggggaaggggccatgtccccgccggcgccagtgctgctgtattgttggtgacaagattgtcctctttgggggtaccagtccatcncctgaggaaggcctgggagatgaatttgaccttatagatcattctgacttacacattttggactttagccctagtctgaagactctgtgcaaactggccgtgattcagtataacctagaccagtcctgtttgcctcatgatatcaggtgggagctgaatgccatgaccaccaacagcaatatcagtcgccccatcgtctcctcccatgggtaggaggaagtttctgccacctcccctcctgagcctgctgtcatcttcactgcccctgcccatctgtcacccacctgctcctttgacccctggacttggtatacctccatgtggagttgttgggcgagaggtgttctctgtgctgtgaaattcagtggggagctgtancggggtgggggctaggttcctccccccttgggccgaaggccccnttcccccttggtgctctgtccccatccacctccctttcanctgctcctgggcctcagctctgcccangggccagccagtttctgctgggaanggaaagggaatgggggaaaaaggaaaancaagcanttgtctgaacctcangancttccccctcccccttttgcctatcccctcccctcngcttgaaccttgaaccttgactgggaacntnaaagnaattgcnncttgttggnangaaaactccttcnnccccntcttggggangnggggaaccaanaaanaaattcccncccttcnttgagctgtnnctgtactctgaantttcnccccnctcaaaatttttaaaaaataatttaaanccncnnanaannnanaanaaanannnngggcgcccccnccttannnnancnaanaacntnaatancngaantgnacncgttnaaaatncaaaaaacccccaaacnctcnngnnttttnaaacnngnttccccnggggtttttttnngaaaannatnnnntggnanttttggncnnggannnanngaaaaaaccngannnccctnnntcccaggtcaaaaattggttn

SEQ ID NO: 967 - DNA, 1319 bp, Homo Sapiens
  misc_feature (1)..(1): n is a, c, g, or t
  misc_feature (883)..(883): n is a, c, g, or t
  misc_feature (923)..(923): n is a, c, g, or t
  misc_feature (926)..(926): n is a, c, g, or t
  misc_feature (958)..(959): n is a, c, g, or t
  misc_feature (968)..(968): n is a, c, g, or t
  misc_feature (976)..(976): n is a, c, g, or t
  misc_feature (986)..(986): n is a, c, g, or t
  misc_feature (1001)..(1001): n is a, c, g, or t
  misc_feature (1006)..(1006): n is a, c, g, or t
  misc_feature (1009)..(1009): n is a, c, g, or t
  misc_feature (1017)..(1017): n is a, c, g, or t
  misc_feature (1024)..(1025): n is a, c, g, or t
  misc_feature (1035)..(1035): n is a, c, g, or t
  misc_feature (1038)..(1038): n is a, c, g, or t
  misc_feature (1044)..(1044): n is a, c, g, or t
  misc_feature (1050)..(1050): n is a, c, g, or t
  misc_feature (1053)..(1053): n is a, c, g, or t
  misc_feature (1064)..(1064): n is a, c, g, or t
  misc_feature (1069)..(1070): n is a, c, g, or t
  misc_feature (1074)..(1074): n is a, c, g, or t
  misc_feature (1078)..(1079): n is a, c, g, or t
  misc_feature (1090)..(1090): n is a, c, g, or t
  misc_feature (1095)..(1095): n is a, c, g, or t
  misc_feature (1097)..(1098): n is a, c, g, or t
  misc_feature (1100)..(1101): n is a, c, g, or t
  misc_feature (1103)..(1103): n is a, c, g, or t
  misc_feature (1106)..(1106): n is a, c, g, or t
  misc_feature (1112)..(1114): n is a, c, g, or t
  misc_feature (1118)..(1118): n is a, c, g, or t
  misc_feature (1128)..(1129): n is a, c, g, or t
  misc_feature (1132)..(1132): n is a, c, g, or t
  misc_feature (1140)..(1140): n is a, c, g, or t
  misc_feature (1142)..(1142): n is a, c, g, or t
  misc_feature (1145)..(1145): n is a, c, g, or t
  misc_feature (1149)..(1149): n is a, c, g, or t
  misc_feature (1159)..(1159): n is a, c, g, or t
  misc_feature (1162)..(1163): n is a, c, g, or t
  misc_feature (1165)..(1166): n is a, c, g, or t
  misc_feature (1168)..(1170): n is a, c, g, or t
  misc_feature (1172)..(1173): n is a, c, g, or t
  misc_feature (1179)..(1179): n is a, c, g, or t
  misc_feature (1193)..(1194): n is a, c, g, or t
  misc_feature (1197)..(1197): n is a, c, g, or t
  misc_feature (1203)..(1203): n is a, c, g, or t
  misc_feature (1208)..(1208): n is a, c, g, or t
  misc_feature (1210)..(1212): n is a, c, g, or t
  misc_feature (1216)..(1217): n is a, c, g, or t
  misc_feature (1223)..(1227): n is a, c, g, or t
  misc_feature (1236)..(1237): n is a, c, g, or t
  misc_feature (1243)..(1243): n is a, c, g, or t
  misc_feature (1245)..(1245): n is a, c, g, or t
  misc_feature (1249)..(1252): n is a, c, g, or t
  misc_feature (1258)..(1261): n is a, c, g, or t
  misc_feature (1263)..(1263): n is a, c, g, or t
  misc_feature (1266)..(1268): n is a, c, g, or t
  misc_feature (1272)..(1272): n is a, c, g, or t
  misc_feature (1274)..(1275): n is a, c, g, or t
  misc_feature (1278)..(1279): n is a, c, g, or t
  misc_feature (1282)..(1282): n is a, c, g, or t
  misc_feature (1285)..(1285): n is a, c, g, or t
  misc_feature (1289)..(1289): n is a, c, g, or t
  misc_feature (1293)..(1296): n is a, c, g, or t
  misc_feature (1298)..(1300): n is a, c, g, or t
  misc_feature (1307)..(1307): n is a, c, g, or t
  misc_feature (1313)..(1313): n is a, c, g, or t
  misc_feature (1315)..(1316): n is a, c, g, or t
naattagagaaattactatgagaggatcgcatcaccatcaccatcacggatcctatttaggtgacactatagaatcgtcgacccacgcgtccgcagccgccaactccggaggcgcggtgctcggcccgggagcgcgagcgggaggagcagagacccgcagccgggagcccgagcgcgggcgatgcaggctccgcgagcggcacctgcggctcctctaagctacgaccgtcgtctccgcggcagcagcgcgggccccagcagcctcggcagccacagccgctgcagccggggcagcctccgctgctgtcgcctcctctgatgcgcttgccctctcccggccccgggactccgggagaatgtgggtcctaggcatcgcggcaactttttgcggattgttcttgcttccaggtgagaatacccagaggccagcagccgaggccaggctttgcgctgcaaatccagtgctaccagtgtgaagaattccagctgaacaacgactgctcctcccccgagttcattgtgaattgcacggtgaacgttcaagacatgtgtcagaaagaagtgatggagcaaagtgccgggatcatgtaccgcaagtcctgtgcatcatcagcggcctgtctcatcgcctctgccgggtaccagtccttctgctccccagggaaactgaactcagtttgcatcagctgctgcaacacccctctttgtaacgggccaaggcccaagaaaaggggaagttctgcctcggccctcaggccagggctccgcaccaccatcctgttcctcaaattagccctcttctcggcacactgctgaagctgaaggagatgccaccccctcctgcattgttcttccagccctcgcccccaaccccccacctccntgagtgagtttcttctgggttgtccttttattctgggtanggnagcgggaatcccgtgttctcttttgttcctgnngcaaataantgaaaaanctcggtaaancatttttgaaaaaanttcanctngactgaanttttcannatgtactttnaangaaagnaggggnaantgaaaatttcnccccnntgtnttgnntaaccggaatnaaggncnngnntnggnaaaatnnnttcnttaaaaatcnntgnaggggggnanttngccnttttttaaanccnncnngnnncnnttccanccctgaaagggggnnaanattttnaaaantnnnaaanngaaaannnnnttttttttnnggggtngngggnnnntttccnnnnanggnnncccncnnttnnaanttnaaantttnnnntnnnaaaaaantttttngnnaaa

SEQ ID NO: 968 - DNA, 1369 bp, Homo Sapiens
  misc_feature (875)..(875): n is a, c, g, or t
  misc_feature (896)..(896): n is a, c, g, or t
  misc_feature (915)..(915): n is a, c, g, or t
  misc_feature (937)..(937): n is a, c, g, or t
  misc_feature (942)..(942): n is a, c, g, or t
  misc_feature (1008)..(1008): n is a, c, g, or t
  misc_feature (1014)..(1014): n is a, c, g, or t
  misc_feature (1024)..(1024): n is a, c, g, or t
  misc_feature (1033)..(1035): n is a, c, g, or t
  misc_feature (1037)..(1037): n is a, c, g, or t
  misc_feature (1039)..(1039): n is a, c, g, or t
  misc_feature (1056)..(1056): n is a, c, g, or t
  misc_feature (1062)..(1062): n is a, c, g, or t
  misc_feature (1064)..(1064): n is a, c, g, or t
  misc_feature (1093)..(1093): n is a, c, g, or t
  misc_feature (1095)..(1095): n is a, c, g, or t
  misc_feature (1101)..(1101): n is a, c, g, or t
  misc_feature (1109)..(1109): n is a, c, g, or t
  misc_feature (1111)..(1111): n is a, c, g, or t
  misc_feature (1116)..(1116): n is a, c, g, or t
  misc_feature (1121)..(1121): n is a, c, g, or t
  misc_feature (1123)..(1123): n is a, c, g, or t
  misc_feature (1129)..(1129): n is a, c, g, or t
  misc_feature (1139)..(1140): n is a, c, g, or t
  misc_feature (1143)..(1145): n is a, c, g, or t
  misc_feature (1148)..(1149): n is a, c, g, or t
  misc_feature (1153)..(1153): n is a, c, g, or t
  misc_feature (1155)..(1155): n is a, c, g, or t
  misc_feature (1164)..(1165): n is a, c, g, or t
  misc_feature (1171)..(1171): n is a, c, g, or t
  misc_feature (1179)..(1179): n is a, c, g, or t
  misc_feature (1182)..(1182): n is a, c, g, or t
  misc_feature (1189)..(1190): n is a, c, g, or t
  misc_feature (1200)..(1201): n is a, c, g, or t
  misc_feature (1205)..(1206): n is a, c, g, or t
  misc_feature (1209)..(1209): n is a, c, g, or t
  misc_feature (1211)..(1211): n is a, c, g, or t
  misc_feature (1216)..(1216): n is a, c, g, or t
  misc_feature (1227)..(1227): n is a, c, g, or t
  misc_feature (1232)..(1232): n is a, c, g, or t
  misc_feature (1242)..(1242): n is a, c, g, or t
  misc_feature (1244)..(1245): n is a, c, g, or t
  misc_feature (1248)..(1248): n is a, c, g, or t
  misc_feature (1251)..(1251): n is a, c, g, or t
  misc_feature (1255)..(1256): n is a, c, g, or t
  misc_feature (1260)..(1260): n is a, c, g, or t
  misc_feature (1262)..(1262): n is a, c, g, or t
  misc_feature (1268)..(1268): n is a, c, g, or t
  misc_feature (1271)..(1272): n is a, c, g, or t
  misc_feature (1275)..(1276): n is a, c, g, or t
  misc_feature (1287)..(1287): n is a, c, g, or t
  misc_feature (1289)..(1289): n is a, c, g, or t
  misc_feature (1293)..(1293): n is a, c, g, or t
  misc_feature (1299)..(1299): n is a, c, g, or t
  misc_feature (1309)..(1309): n is a, c, g, or t
  misc_feature (1311)..(1313): n is a, c, g, or t
  misc_feature (1316)..(1317): n is a, c, g, or t
  misc_feature (1320)..(1322): n is a, c, g, or t
  misc_feature (1332)..(1337): n is a, c, g, or t
  misc_feature (1340)..(1342): n is a, c, g, or t
  misc_feature (1345)..(1351): n is a, c, g, or t
  misc_feature (1354)..(1361): n is a, c, g, or t
  misc_feature (1364)..(1366): n is a, c, g, or t
  misc_feature (1369)..(1369): n is a, c, g, or t
atagagaaattactatgagaggatcgcatcaccatcaccatcacggatcctatttaggtgacactatagaatcgtcgacccacgcgtccgcagagattgaggacgaggaggagaaggtctccaggtaccgagagctgctggtgcggctgccccctgtcaaccgggccacagtgaaggcccttatcagccacctgtactgtgttcagtgcttctcagacacgaaccagatgaacgtgcacaacctggcaattgtgtttgggcccacgctcttccagacagatgggcaggactacaaggctggccgtgtggtggaagacctcattaaccactatgtggtggtgtttagtgtggatgaggaagagctcaggaagcagcgggaggagatcactgccattgtgaagatgcgcgtggctggcactgccagtgggacccagcatgccggtgacttcatctgcacagtgtatctggaagagaagaaggcagagactgagcagcatatcaaggtcccagcatccatgactgctgaggagctcaccctggagatcctggatcgccggaacgtgggcatcagggagaaggactattggacctgctttgaggtcaacgagagggaggaggcagagcgccccctgcactttgcggagaaggtgctgcccatcctgcacgggctgggcacggacagccacctggtggtgaagaagcaccaggccatggaggccatgctgctgtacctggccagccgtgtcggtgacaccaagcatggcatgatgaagttccgtgaggaccgcagcctcctgggcctgggcctgccctcaggtggcttccacgatcgctacttcatcctcaacagcagctgcttgcggctctacaaggangtccggagtcaccggcctganaaaggagtggcctattaanagtctcaaagtctacctgggantgaanaaaaaactcaggccacccccctgctggggcttcccagtggtgcatgaaacaaaaaaacatgaaaancaccantggttacctntgctgtgannnananaatggaacctccgggantgggtncnctaccttttctgtttgggcaaccatgacngncctggnttggcccncnaaaancctcncncgtttncccgggcaannccnnnagnnccgncngggaaatgnntccccnatcccccntcnaggaaannaaaaaaaatnncccnnaangnggttnccttcccgggnaaccntttttttttngnnaanttngaannaagnancccccntgnntcnngaatccccccngnaacntttttnaacccctttncnnngcnnttnnnccccgggggnnnnnnaannnccnnnnnnnttnnnnnnnnggnnnggn

SEQ ID NO: 969 - DNA, 1200 bp, Homo Sapiens
  misc_feature (3)..(3): n is a, c, g, or t
  misc_feature (11)..(11): n is a, c, g, or t
  misc_feature (76)..(76): n is a, c, g, or t
  misc_feature (92)..(92): n is a, c, g, or t
  misc_feature (102)..(102): n is a, c, g, or t
  misc_feature (133)..(133): n is a, c, g, or t
  misc_feature (144)..(144): n is a, c, g, or t
  misc_feature (146)..(147): n is a, c, g, or t
  misc_feature (169)..(169): n is a, c, g, or t
  misc_feature (175)..(175): n is a, c, g, or t
  misc_feature (177)..(177): n is a, c, g, or t
  misc_feature (232)..(232): n is a, c, g, or t
  misc_feature (269)..(269): n is a, c, g, or t
  misc_feature (294)..(295): n is a, c, g, or t
  misc_feature (310)..(310): n is a, c, g, or t
  misc_feature (328)..(328): n is a, c, g, or t
  misc_feature (378)..(378): n is a, c, g, or t
  misc_feature (414)..(414): n is a, c, g, or t
  misc_feature (421)..(421): n is a, c, g, or t
  misc_feature (427)..(427): n is a, c, g, or t
  misc_feature (440)..(440): n is a, c, g, or t
  misc_feature (465)..(465): n is a, c, g, or t
  misc_feature (493)..(493): n is a, c, g, or t
  misc_feature (572)..(572): n is a, c, g, or t
  misc_feature (658)..(658): n is a, c, g, or t
  misc_feature (715)..(715): n is a, c, g, or t
  misc_feature (754)..(754): n is a, c, g, or t
  misc_feature (819)..(819): n is a, c, g, or t
  misc_feature (822)..(823): n is a, c, g, or t
  misc_feature (834)..(834): n is a, c, g, or t
  misc_feature (849)..(851): n is a, c, g, or t
  misc_feature (858)..(858): n is a, c, g, or t
  misc_feature (870)..(870): n is a, c, g, or t
  misc_feature (878)..(878): n is a, c, g, or t
  misc_feature (880)..(880): n is a, c, g, or t
  misc_feature (892)..(892): n is a, c, g, or t
  misc_feature (896)..(896): n is a, c, g, or t
  misc_feature (912)..(912): n is a, c, g, or t
  misc_feature (943)..(943): n is a, c, g, or t
  misc_feature (952)..(952): n is a, c, g, or t
  misc_feature (961)..(961): n is a, c, g, or t
  misc_feature (966)..(966): n is a, c, g, or t
  misc_feature (969)..(971): n is a, c, g, or t
  misc_feature (977)..(977): n is a, c, g, or t
  misc_feature (983)..(983): n is a, c, g, or t
  misc_feature (986)..(986): n is a, c, g, or t
  misc_feature (989)..(989): n is a, c, g, or t
  misc_feature (994)..(994): n is a, c, g, or t
  misc_feature (996)..(996): n is a, c, g, or t
  misc_feature (999)..(999): n is a, c, g, or t
  misc_feature (1005)..(1005): n is a, c, g, or t
  misc_feature (1009)..(1012): n is a, c, g, or t
  misc_feature (1016)..(1016): n is a, c, g, or t
  misc_feature (1022)..(1022): n is a, c, g, or t
  misc_feature (1024)..(1024): n is a, c, g, or t
  misc_feature (1043)..(1043): n is a, c, g, or t
  misc_feature (1058)..(1058): n is a, c, g, or t
  misc_feature (1061)..(1061): n is a, c, g, or t
  misc_feature (1065)..(1065): n is a, c, g, or t
  misc_feature (1074)..(1074): n is a, c, g, or t
  misc_feature (1079)..(1080): n is a, c, g, or t
  misc_feature (1095)..(1097): n is a, c, g, or t
  misc_feature (1111)..(1111): n is a, c, g, or t
  misc_feature (1119)..(1119): n is a, c, g, or t
  misc_feature (1126)..(1126): n is a, c, g, or t
  misc_feature (1136)..(1136): n is a, c, g, or t
  misc_feature (1138)..(1138): n is a, c, g, or t
  misc_feature (1144)..(1144): n is a, c, g, or t
  misc_feature (1146)..(1146): n is a, c, g, or t
  misc_feature (1149)..(1149): n is a, c, g, or t
  misc_feature (1157)..(1157): n is a, c, g, or t
  misc_feature (1163)..(1163): n is a, c, g, or t
  misc_feature (1167)..(1168): n is a, c, g, or t
  misc_feature (1173)..(1173): n is a, c, g, or t
  misc_feature (1177)..(1177): n is a, c, g, or t
  misc_feature (1194)..(1194): n is a, c, g, or t
  misc_feature (1199)..(1199): n is a, c, g, or t
ganatagaggnaaattactatgaataggatcgcatcaccttcaccagtcacggatcctatttaggtgacactattngaatcgatcgacaccncgcgtccggntacagcacattccctttctggaagtcagaanattcgtctcananngaagtcctacgttatgtaatgnatgtgncnacaccatttaagtctagctcatcccttcgttatcatcagagaattcacactggantagaagccttttaaatgtagtgaatgtgggagagccntcagccagagtgcctctcttattcnncatgaaagaattcanaccggagaaaagccctanagatgcgatgaatgtgggaaaggctttacttctatttcacgacttaatanacaccgaataattcatactggagagaaattgtatanttgtaangaatgnggtaaagccttangctcccactccacacttattattcntgagcgaattcatactggagaaaaaccntgtaaatgtaaagtatgtggaaaagccttcagacagagttccgctctcattcaacatcagagaatgcatactggagaangaccctataagtgtaacgaatgtgacaaaacattcaggtgtaactcatcgcttagtaatcaccagagaattcatactggagagaanccatatcgatgtttagaatgtgggatgtcttttggccaaagtgcagctcttatacgncatcagaggattcatacaggaaaaaacccttttaaatgnaaatacatgtggaaaaaacttttagacaaagctcatcacttattgcacatcaaagaaattcatantgnnagaaaaaaccntatgaatggtaatgnnnggggggnaaactcttttanccagaggncntcccttactaancatnaaaaaattcccattgnaaaaggactcctttaaaagccgattttgcangtggtgaanggccttaanccccnaannnccttcnaaaaanacntgncttgnanagngatttnattnnnnaatnatggantntggaaaaaacccctaattnccccttccaataacnaantttntaaaaaaantcttnncctggggaccacttnnngggaaaagcctttnaacctggnccccccnttttttaaanancccgananaanttcctgtnttccancttnnaaatnggcntttggaaaaaaaaaggnaggtnt

SEQ ID NO: 970 - DNA, 1200 bp, Homo Sapiens
  misc_feature (887)..(887): n is a, c, g, or t
  misc_feature (902)..(902): n is a, c, g, or t
  misc_feature (910)..(910): n is a, c, g, or t
  misc_feature (912)..(912): n is a, c, g, or t
  misc_feature (948)..(948): n is a, c, g, or t
  misc_feature (963)..(963): n is a, c, g, or t
  misc_feature (975)..(975): n is a, c, g, or t
  misc_feature (977)..(977): n is a, c, g, or t
  misc_feature (983)..(983): n is a, c, g, or t
  misc_feature (996)..(996): n is a, c, g, or t
  misc_feature (999)..(999): n is a, c, g, or t
  misc_feature (1003)..(1003): n is a, c, g, or t
  misc_feature (1011)..(1011): n is a, c, g, or t
  misc_feature (1015)..(1015): n is a, c, g, or t
  misc_feature (1018)..(1018): n is a, c, g, or t
  misc_feature (1021)..(1021): n is a, c, g, or t
  misc_feature (1025)..(1025): n is a, c, g, or t
  misc_feature (1027)..(1027): n is a, c, g, or t
  misc_feature (1038)..(1038): n is a, c, g, or t
  misc_feature (1044)..(1044): n is a, c, g, or t
  misc_feature (1050)..(1051): n is a, c, g, or t
  misc_feature (1054)..(1054): n is a, c, g, or t
  misc_feature (1057)..(1057): n is a, c, g, or t
  misc_feature (1060)..(1060): n is a, c, g, or t
  misc_feature (1071)..(1071): n is a, c, g, or t
  misc_feature (1075)..(1075): n is a, c, g, or t
  misc_feature (1077)..(1077): n is a, c, g, or t
  misc_feature (1080)..(1081): n is a, c, g, or t
  misc_feature (1085)..(1085): n is a, c, g, or t
  misc_feature (1089)..(1089): n is a, c, g, or t
  misc_feature (1091)..(1091): n is a, c, g, or t
  misc_feature (1093)..(1093): n is a, c, g, or t
  misc_feature (1098)..(1098): n is a, c, g, or t
  misc_feature (1105)..(1106): n is a, c, g, or t
  misc_feature (1125)..(1125): n is a, c, g, or t
  misc_feature (1132)..(1133): n is a, c, g, or t
  misc_feature (1138)..(1138): n is a, c, g, or t
  misc_feature (1145)..(1145): n is a, c, g, or t
  misc_feature (1149)..(1150): n is a, c, g, or t
  misc_feature (1153)..(1153): n is a, c, g, or t
  misc_feature (1156)..(1156): n is a, c, g, or t
  misc_feature (1159)..(1159): n is a, c, g, or t
  misc_feature (1164)..(1164): n is a, c, g, or t
  misc_feature (1166)..(1167): n is a, c, g, or t
  misc_feature (1170)..(1170): n is a, c, g, or t
  misc_feature (1181)..(1181): n is a, c, g, or t
  misc_feature (1189)..(1189): n is a, c, g, or t
  misc_feature (1198)..(1198): n is a, c, g, or t
  misc_feature (1200)..(1200): n is a, c, g, or t
aatagagaaattactatgagaggatcgcatcaccatcaccatcacggatcctatttaggtgacactatagaatcgtcgacccacgcgtccgtgaccttggagatacctcatcatatcacacaaagagatgcagatagaactttgagcatacctgatgaacagttacactcatttgcggtttccaccgtgcacattatgaagaaaagaaatggaggtgggagtttaaataactattcctcctccattccatcgactcccagcaccagccaggaggaccctcagttcagtgttcctcccactgccaacacacccacgcccgtttgcaagcggtccatgcgctggtccaacctgtttacatctgagaaagggagtgacccagacaaagagaggaaagccccggagaatcatgctgacaccatcgggagcggtagagccatccccattaaacagggcatgctcttaaagcgaagtgggaaatggctgaagacatggaaaaagaaatacgtcaccctgtgttccaatggcatgctcacctattattcaagcttaggtgattatatgaagaatattcataaaaaagagattgaccttcagacatctaccatcaaagtcccaggaaagtggccatccctagccacatcggcctgcacacccatctccagctctaaaagcaatggcctatccaaggacatggacaccgggctgggtgactccatatgcttcagccccagtatctccagcaccaccagccccaagctcaacccgcccccctctcctcatgctaataaaaagaaacacctaaagaagaaaagcaccaacaactttatgattgtgtctgccactggccaaacgtggcactttgaagccacgacgtatgaggagcgggnatgcctgggtccaanccatccananccagatcctggccagcctgcagtcatgcgaaagcantaaaacaagtcccanctgaccagccanancgaagncatggccctgcantcnatcnaaaatgcntggnacnccnctgngngactgggaaanccaaancctaannggncanttngaacttgggantccncntgnntatngaangncncaggnatccccnnatcttggcccccccctttnccggggnnaattntggaacnggannaanggnccnttaancnncgnaaggttattcntcttttgncaaggaccnan

SEQ ID NO: 971 - DNA, 1428 bp, Homo Sapiens
  misc_feature (849)..(849): n is a, c, g, or t
  misc_feature (867)..(867): n is a, c, g, or t
  misc_feature (877)..(877): n is a, c, g, or t
  misc_feature (879)..(879): n is a, c, g, or t
  misc_feature (887)..(887): n is a, c, g, or t
  misc_feature (889)..(889): n is a, c, g, or t
  misc_feature (892)..(892): n is a, c, g, or t
  misc_feature (909)..(909): n is a, c, g, or t
  misc_feature (932)..(932): n is a, c, g, or t
  misc_feature (938)..(938): n is a, c, g, or t
  misc_feature (943)..(943): n is a, c, g, or t
  misc_feature (953)..(953): n is a, c, g, or t
  misc_feature (958)..(959): n is a, c, g, or t
  misc_feature (961)..(961): n is a, c, g, or t
  misc_feature (969)..(969): n is a, c, g, or t
  misc_feature (981)..(981): n is a, c, g, or t
  misc_feature (994)..(994): n is a, c, g, or t
  misc_feature (1006)..(1006): n is a, c, g, or t
  misc_feature (1014)..(1015): n is a, c, g, or t
  misc_feature (1019)..(1019): n is a, c, g, or t
  misc_feature (1031)..(1031): n is a, c, g, or t
  misc_feature (1037)..(1037): n is a, c, g, or t
  misc_feature (1052)..(1052): n is a, c, g, or t
  misc_feature (1056)..(1056): n is a, c, g, or t
  misc_feature (1060)..(1060): n is a, c, g, or t
  misc_feature (1063)..(1063): n is a, c, g, or t
  misc_feature (1067)..(1067): n is a, c, g, or t
  misc_feature (1073)..(1074): n is a, c, g, or t
  misc_feature (1078)..(1078): n is a, c, g, or t
  misc_feature (1080)..(1080): n is a, c, g, or t
  misc_feature (1082)..(1082): n is a, c, g, or t
  misc_feature (1086)..(1086): n is a, c, g, or t
  misc_feature (1089)..(1089): n is a, c, g, or t
  misc_feature (1092)..(1092): n is a, c, g, or t
  misc_feature (1108)..(1108): n is a, c, g, or t
  misc_feature (1120)..(1120): n is a, c, g, or t
  misc_feature (1125)..(1125): n is a, c, g, or t
  misc_feature (1131)..(1131): n is a, c, g, or t
  misc_feature (1146)..(1146): n is a, c, g, or t
  misc_feature (1149)..(1149): n is a, c, g, or t
  misc_feature (1151)..(1151): n is a, c, g, or t
  misc_feature (1154)..(1154): n is a, c, g, or t
  misc_feature (1166)..(1166): n is a, c, g, or t
  misc_feature (1168)..(1169): n is a, c, g, or t
  misc_feature (1171)..(1171): n is a, c, g, or t
  misc_feature (1175)..(1175): n is a, c, g, or t
  misc_feature (1183)..(1183): n is a, c, g, or t
  misc_feature (1193)..(1193): n is a, c, g, or t
  misc_feature (1200)..(1200): n is a, c, g, or t
  misc_feature (1202)..(1202): n is a, c, g, or t
  misc_feature (1207)..(1207): n is a, c, g, or t
  misc_feature (1209)..(1209): n is a, c, g, or t
  misc_feature (1212)..(1212): n is a, c, g, or t
  misc_feature (1218)..(1218): n is a, c, g, or t
  misc_feature (1225)..(1225): n is a, c, g, or t
  misc_feature (1233)..(1233): n is a, c, g, or t
  misc_feature (1243)..(1243): n is a, c, g, or t
  misc_feature (1248)..(1248): n is a, c, g, or t
  misc_feature (1250)..(1250): n is a, c, g, or t
  misc_feature (1252)..(1253): n is a, c, g, or t
  misc_feature (1257)..(1257): n is a, c, g, or t
  misc_feature (1265)..(1265): n is a, c, g, or t
  misc_feature (1268)..(1269): n is a, c, g, or t
  misc_feature (1280)..(1280): n is a, c, g, or t
  misc_feature (1287)..(1287): n is a, c, g, or t
  misc_feature (1290)..(1290): n is a, c, g, or t
  misc_feature (1295)..(1296): n is a, c, g, or t
  misc_feature (1308)..(1308): n is a, c, g, or t
  misc_feature (1310)..(1310): n is a, c, g, or t
  misc_feature (1317)..(1317): n is a, c, g, or t
  misc_feature (1320)..(1322): n is a, c, g, or t
  misc_feature (1329)..(1329): n is a, c, g, or t
  misc_feature (1338)..(1338): n is a, c, g, or t
  misc_feature (1340)..(1341): n is a, c, g, or t
  misc_feature (1344)..(1345): n is a, c, g, or t
  misc_feature (1347)..(1347): n is a, c, g, or t
  misc_feature (1352)..(1352): n is a, c, g, or t
  misc_feature (1357)..(1357): n is a, c, g, or t
  misc_feature (1359)..(1360): n is a, c, g, or t
  misc_feature (1362)..(1362): n is a, c, g, or t
  misc_feature (1364)..(1364): n is a, c, g, or t
  misc_feature (1366)..(1366): n is a, c, g, or t
  misc_feature (1374)..(1374): n is a, c, g, or t
  misc_feature (1380)..(1380): n is a, c, g, or t
  misc_feature (1385)..(1385): n is a, c, g, or t
  misc_feature (1388)..(1388): n is a, c, g, or t
  misc_feature (1390)..(1392): n is a, c, g, or t
  misc_feature (1394)..(1394): n is a, c, g, or t
  misc_feature (1397)..(1397): n is a, c, g, or t
  misc_feature (1404)..(1405): n is a, c, g, or t
  misc_feature (1409)..(1409): n is a, c, g, or t
  misc_feature (1412)..(1412): n is a, c, g, or t
  misc_feature (1414)..(1414): n is a, c, g, or t
  misc_feature (1416)..(1416): n is a, c, g, or t
  misc_feature (1418)..(1418): n is a, c, g, or t
  misc_feature (1421)..(1422): n is a, c, g, or t
  misc_feature (1424)..(1424): n is a, c, g, or t
  misc_feature (1426)..(1426): n is a, c, g, or t
tagagaaattactatgagaggatcgcatcaccatcaccatcacgggatcctatttaggtgacactatagaatcgtcgacccacgcgtccgcaggcgtgcttgtgggacacccgtttgacacggtcaaggtacggcttcaggtccagagcgtggagaagcctcagtaccgcgggacgttgcactgcttcaagtccatcatcaagcaagagagcgtgctgggcctgtacaagggcctgggctcgccgctcatggggctcaccttcatcaacgcgctggtgttcggggtgcagggcaacaccctccgggccctgggccacgactcgcccctcaaccagttcctggcaggtgcggcggcgggcgccatccagtgcgtcatctgctgccccatggagctggccaagacgcggctgcagctgcaggacgcgggcccagcgcgcacctacaagggctcgctggactgcctcgcgcagatctacgggcacgagggtctgcgtggcgtcaaccggggcatggtgtccacgttgctgcgtgagactcccagcttcggcgtctacttcctcacctatgacgctctcacgcgggcgctgggctgcgagccgggcgaccgcctgctggtgcccaagctgctgttggcgggcggtacgtcaggcatcgtgtcctggctctctacctatcctgtggacgtggtcaagtcgcggctgcaggcggacggactgcggggcgccccgcgctaccgcggcatcctggactgcgtgcaccagagctaccgcgccgagggctggcgcgtcttcacacgggggctggcgtccacgctgctgcgcgccttccccgtcaacgctgccaacttcnccaccgtcacggtggtgntcacctaacncncgcggccnanaangccgggccccaaaggcnaaagctgtgcccgccgcccctgnggggcntgccntggacgcaanccctnnancctgtgangcttcacccccnccttcctttcccnaagggttctttntcaaaaanntggnaaaaaaaatggncccctnaaatcaattgccctncttnctgnctngaangcctgnnaacntntnaaantcnaanaaaaagtgggttaaanttttgcttaatnaactnggaaanttttgcccaaaaaantcncnttncccccaagtttncnntnaaanaaaaaaanaaccctcttnccccccntnttaantnccnaaactnaaaaaantatttccnaaaataaccnaaacntngnntggntaaaaccnttnncctttatcctnaaaaatnaanaaaanncccacccttttntnaaatgtnacnnnttttttnctacctacnanngtnncngggtnttaananntncnanaggtcccnaaacanaaatnctnannncnccngggggtnngcanccncncntnatnnananaa

SEQ ID NO: 972 - DNA, 1273 bp, Homo Sapiens
  misc_feature (1)..(1): n is a, c, g, or t
  misc_feature (894)..(894): n is a, c, g, or t
  misc_feature (903)..(903): n is a, c, g, or t
  misc_feature (907)..(907): n is a, c, g, or t
  misc_feature (973)..(973): n is a, c, g, or t
  misc_feature (975)..(975): n is a, c, g, or t
  misc_feature (1009)..(1009): n is a, c, g, or t
  misc_feature (1020)..(1020): n is a, c, g, or t
  misc_feature (1036)..(1036): n is a, c, g, or t
  misc_feature (1044)..(1044): n is a, c, g, or t
  misc_feature (1048)..(1048): n is a, c, g, or t
  misc_feature (1054)..(1054): n is a, c, g, or t
  misc_feature (1058)..(1058): n is a, c, g, or t
  misc_feature (1061)..(1061): n is a, c, g, or t
  misc_feature (1078)..(1078): n is a, c, g, or t
  misc_feature (1081)..(1082): n is a, c, g, or t
  misc_feature (1085)..(1085): n is a, c, g, or t
  misc_feature (1088)..(1088): n is a, c, g, or t
  misc_feature (1094)..(1094): n is a, c, g, or t
  misc_feature (1100)..(1100): n is a, c, g, or t
  misc_feature (1102)..(1103): n is a, c, g, or t
  misc_feature (1109)..(1109): n is a, c, g, or t
  misc_feature (1111)..(1111): n is a, c, g, or t
  misc_feature (1124)..(1124): n is a, c, g, or t
  misc_feature (1137)..(1137): n is a, c, g, or t
  misc_feature (1140)..(1141): n is a, c, g, or t
  misc_feature (1144)..(1144): n is a, c, g, or t
  misc_feature (1151)..(1151): n is a, c, g, or t
  misc_feature (1154)..(1154): n is a, c, g, or t
  misc_feature (1156)..(1157): n is a, c, g, or t
  misc_feature (1159)..(1162): n is a, c, g, or t
  misc_feature (1164)..(1164): n is a, c, g, or t
  misc_feature (1175)..(1175): n is a, c, g, or t
  misc_feature (1178)..(1178): n is a, c, g, or t
  misc_feature (1180)..(1180): n is a, c, g, or t
  misc_feature (1183)..(1184): n is a, c, g, or t
  misc_feature (1186)..(1186): n is a, c, g, or t
  misc_feature (1189)..(1191): n is a, c, g, or t
  misc_feature (1196)..(1198): n is a, c, g, or t
  misc_feature (1201)..(1201): n is a, c, g, or t
  misc_feature (1210)..(1211): n is a, c, g, or t
  misc_feature (1215)..(1215): n is a, c, g, or t
  misc_feature (1219)..(1219): n is a, c, g, or t
  misc_feature (1222)..(1224): n is a, c, g, or t
  misc_feature (1228)..(1230): n is a, c, g, or t
  misc_feature (1232)..(1236): n is a, c, g, or t
  misc_feature (1240)..(1245): n is a, c, g, or t
  misc_feature (1247)..(1252): n is a, c, g, or t
  misc_feature (1255)..(1258): n is a, c, g, or t
  misc_feature (1264)..(1264): n is a, c, g, or t
  misc_feature (1267)..(1269): n is a, c, g, or t
  misc_feature (1272)..(1273): n is a, c, g, or t
naatagagaaattactatgagaggatcgcatcaccatcaccatcacggatcctatttaggtgacactatagaatcgtcgacccacgcgtccggcaataatcagggagcagttgtcttgacctatgatgagggggtgaccggccatccctgggcatgggatggggagtgtgggtgggggctggctgtgggggctccgcgcctggatgtgatgttgaaattttgtgttgctttaaccgcctttactttctgagctaggggctgtctccatccatagcaaaagtgtaactttgttgtagatgggcgtaagcctcaccctggagagcgctagtacggcttcaggtccagagcgtggagaagcctcagtaccgcgggacgttgcactgcttcaagtccatcatcaagcaagagagcgtgctgggcctgtacaagggcctgggctcgccgctcatggggctcaccttcatcaacgcgctggtgttcggggtgcagggcaacaccctccgagccctgggccacgactcgcccctcaaccagttcctggcaggtgcggcggcgggcgccatccagtgcgtcatctgctgccccatggagctggccaagacgcggctgcagctgcaggacgcgggcccagcgcgcacctacaagggctcgctggactgcctcgcgcagatctacgggcacgagggtctgcgtggcgtcaaccggggcatggtgtccacgttgctgcgtgagactcccagcttcggcgtctacttcctcacctatgacgctctcacgcgggcgctgggctgcgagccgggcgaccgcctgctggtgcccaagctgctgttggcgggcggtacgtcaggcatcgtgtcctggctctctacctatcctgtggacgtggtcaagtcncggctgcangcgnacggactgcggggcgccccgcgctaccgcggcatcctggactgcgtgcaccaaaactaccgcgccnangggctggcgcgtcttcacacgggggctggcgtcnacgctgctgcncgccttccccgtcaanctgccacnttcncaccgntcanggngggctcacctacccccncgnnaanaancccggncccaangnnaagctntnccccccccccctngggggcctgcccnggnnaancctccanccngnnannnnancccccctcttnccnanggnncnttnnnaaaannnggnaaaaaaatnncccnaaanaannncccnnncnnnnngaannnnnnannnnnnaannnnaaaaanggnnnaann

SEQ ID NO: 973 - DNA, 1440 bp, Homo Sapiens
  misc_feature (543)..(543): n is a, c, g, or t
  misc_feature (861)..(861): n is a, c, g, or t
  misc_feature (932)..(932): n is a, c, g, or t
  misc_feature (942)..(942): n is a, c, g, or t
  misc_feature (957)..(957): n is a, c, g, or t
  misc_feature (960)..(960): n is a, c, g, or t
  misc_feature (969)..(969): n is a, c, g, or t
  misc_feature (975)..(975): n is a, c, g, or t
  misc_feature (977)..(979): n is a, c, g, or t
  misc_feature (981)..(981): n is a, c, g, or t
  misc_feature (983)..(1018): n is a, c, g, or t
  misc_feature (1022)..(1036): n is a, c, g, or t
  misc_feature (1041)..(1047): n is a, c, g, or t
  misc_feature (1049)..(1052): n is a, c, g, or t
  misc_feature (1075)..(1075): n is a, c, g, or t
  misc_feature (1078)..(1078): n is a, c, g, or t
  misc_feature (1084)..(1084): n is a, c, g, or t
  misc_feature (1089)..(1089): n is a, c, g, or t
  misc_feature (1093)..(1093): n is a, c, g, or t
  misc_feature (1096)..(1097): n is a, c, g, or t
  misc_feature (1100)..(1101): n is a, c, g, or t
  misc_feature (1103)..(1106): n is a, c, g, or t
  misc_feature (1108)..(1109): n is a, c, g, or t
  misc_feature (1117)..(1117): n is a, c, g, or t
  misc_feature (1120)..(1121): n is a, c, g, or t
  misc_feature (1123)..(1123): n is a, c, g, or t
  misc_feature (1130)..(1130): n is a, c, g, or t
  misc_feature (1135)..(1135): n is a, c, g, or t
  misc_feature (1140)..(1140): n is a, c, g, or t
  misc_feature (1143)..(1143): n is a, c, g, or t
  misc_feature (1158)..(1158): n is a, c, g, or t
  misc_feature (1163)..(1163): n is a, c, g, or t
  misc_feature (1171)..(1171): n is a, c, g, or t
  misc_feature (1173)..(1173): n is a, c, g, or t
  misc_feature (1177)..(1177): n is a, c, g, or t
  misc_feature (1181)..(1182): n is a, c, g, or t
  misc_feature (1189)..(1189): n is a, c, g, or t
  misc_feature (1216)..(1216): n is a, c, g, or t
  misc_feature (1222)..(1222): n is a, c, g, or t
  misc_feature (1224)..(1224): n is a, c, g, or t
  misc_feature (1226)..(1226): n is a, c, g, or t
  misc_feature (1239)..(1239): n is a, c, g, or t
  misc_feature (1251)..(1251): n is a, c, g, or t
  misc_feature (1257)..(1257): n is a, c, g, or t
  misc_feature (1264)..(1264): n is a, c, g, or t
  misc_feature (1277)..(1277): n is a, c, g, or t
  misc_feature (1279)..(1279): n is a, c, g, or t
  misc_feature (1281)..(1281): n is a, c, g, or t
  misc_feature (1284)..(1284): n is a, c, g, or t
  misc_feature (1286)..(1286): n is a, c, g, or t
  misc_feature (1288)..(1288): n is a, c, g, or t
  misc_feature (1291)..(1292): n is a, c, g, or t
  misc_feature (1296)..(1296): n is a, c, g, or t
  misc_feature (1301)..(1301): n is a, c, g, or t
  misc_feature (1305)..(1306): n is a, c, g, or t
  misc_feature (1309)..(1309): n is a, c, g, or t
  misc_feature (1311)..(1311): n is a, c, g, or t
  misc_feature (1313)..(1313): n is a, c, g, or t
  misc_feature (1336)..(1336): n is a, c, g, or t
  misc_feature (1344)..(1344): n is a, c, g, or t
  misc_feature (1347)..(1348): n is a, c, g, or t
  misc_feature (1358)..(1358): n is a, c, g, or t
  misc_feature (1361)..(1361): n is a, c, g, or t
  misc_feature (1365)..(1365): n is a, c, g, or t
  misc_feature (1369)..(1369): n is a, c, g, or t
  misc_feature (1378)..(1378): n is a, c, g, or t
  misc_feature (1385)..(1387): n is a, c, g, or t
  misc_feature (1393)..(1393): n is a, c, g, or t
  misc_feature (1395)..(1395): n is a, c, g, or t
  misc_feature (1405)..(1405): n is a, c, g, or t
  misc_feature (1407)..(1408): n is a, c, g, or t
  misc_feature (1411)..(1411): n is a, c, g, or t
  misc_feature (1414)..(1414): n is a, c, g, or t
  misc_feature (1417)..(1417): n is a, c, g, or t
  misc_feature (1429)..(1429): n is a, c, g, or t
  misc_feature (1436)..(1437): n is a, c, g, or t
  misc_feature (1439)..(1440): n is a, c, g, or t
agagattactatgagaggatcgcatcaccatcaccatcacggatcctatttaggtgacactatagaatcgtcgacccacgcgtccgcccacgcgtccgggccacatctgccagagcctggagtctgcgaaggccgggacccggttccccggcccacagtgggggtgtgcaaacccgagagaactgggttgcaaattcgtgaagaatcagcatcatgtttggcagctgagtattggagccaggagcctgccatgaggttttgagaacagagtgctgttttagagctggcagcagcatctcagcccaagagaaggttatattcccagaggatgtcagtcccaaggaccagtagctgccatcagtttggattctgaaaactaactggcatcaacactgggtgtagaaacatgcttgccttatgtatcagaggacatgctcagcagatccaagagatatatttggcaactttttctagaaaaggcacattgggtatcattcattacatttttgagtttttttgggtttttttttttttttttttganacagtcttgctgtattgcccaggctggagtgtggtggcacaatcacagctcattgcatcctcaatcacccaggcctaagcaatcctcccaccttgtagctgggactacagctcacagcacacctggctaaaattttttttttttgttgagacggattctctatgttgcccaggctggtctcaggctcctgggctcagatggtcctcctgcctcagcttccaaaggcacaggccaagttgtagctttgtcccttgccatcatgcccaacaagaggttctataccttttaatgaaattgactttcataaattggttatgnttggggggccaagttcctttaagctggaaattgtaaatttcctcctgaaatgttttttcctgcagttaccntgaacctaanactacaataaagganggncttgggggnaaaaanannnanannnnnnnnnnnnnnnnnnnnnnnnnnnnnnnnnnnnaaannnnnnnnnnnnnnnaaaannnnnnnannnnaaaaaaaaggggccccccccccnaangggggncccanatanctnnatnncnnnncnngggccccnggnnanaaccccnaaagnccccnaanccccccgggtttttncaaancccccggncncccngggnnttttttngggaaaaccccccccttggaaatttcnggccangngncaaagggaaaaanccgggaaccccncgtaanccccggncccaaaaaatttngngnttncngngcnngccnaaacncccnnggnananccctttaaacacaaaaaaaaaantttccccnttnncttcccccgnagncccntttnggaaaaagnggggggnnncccctncnttaaaaaatncnnggnaanccnttttaggggggnccctctnntnn

SEQ ID NO: 974 - DNA, 1344 bp, Homo Sapiens
  misc_feature (856)..(856): n is a, c, g, or t
  misc_feature (883)..(883): n is a, c, g, or t
  misc_feature (885)..(885): n is a, c, g, or t
  misc_feature (894)..(894): n is a, c, g, or t
  misc_feature (904)..(904): n is a, c, g, or t
  misc_feature (907)..(907): n is a, c, g, or t
  misc_feature (951)..(951): n is a, c, g, or t
  misc_feature (988)..(988): n is a, c, g, or t
  misc_feature (991)..(991): n is a, c, g, or t
  misc_feature (1000)..(1000): n is a, c, g, or t
  misc_feature (1011)..(1011): n is a, c, g, or t
  misc_feature (1020)..(1020): n is a, c, g, or t
  misc_feature (1038)..(1038): n is a, c, g, or t
  misc_feature (1048)..(1048): n is a, c, g, or t
  misc_feature (1071)..(1071): n is a, c, g, or t
  misc_feature (1073)..(1073): n is a, c, g, or t
  misc_feature (1093)..(1093): n is a, c, g, or t
  misc_feature (1102)..(1102): n is a, c, g, or t
  misc_feature (1116)..(1116): n is a, c, g, or t
  misc_feature (1118)..(1118): n is a, c, g, or t
  misc_feature (1123)..(1123): n is a, c, g, or t
  misc_feature (1126)..(1126): n is a, c, g, or t
  misc_feature (1129)..(1129): n is a, c, g, or t
  misc_feature (1146)..(1146): n is a, c, g, or t
  misc_feature (1149)..(1149): n is a, c, g, or t
  misc_feature (1155)..(1155): n is a, c, g, or t
  misc_feature (1162)..(1163): n is a, c, g, or t
  misc_feature (1177)..(1177): n is a, c, g, or t
  misc_feature (1179)..(1179): n is a, c, g, or t
  misc_feature (1187)..(1188): n is a, c, g, or t
  misc_feature (1190)..(1190): n is a, c, g, or t
  misc_feature (1192)..(1192): n is a, c, g, or t
  misc_feature (1194)..(1194): n is a, c, g, or t
  misc_feature (1199)..(1200): n is a, c, g, or t
  misc_feature (1205)..(1206): n is a, c, g, or t
  misc_feature (1218)..(1218): n is a, c, g, or t
  misc_feature (1223)..(1224): n is a, c, g, or t
  misc_feature (1228)..(1228): n is a, c, g, or t
  misc_feature (1231)..(1231): n is a, c, g, or t
  misc_feature (1234)..(1234): n is a, c, g, or t
  misc_feature (1238)..(1238): n is a, c, g, or t
  misc_feature (1241)..(1241): n is a, c, g, or t
  misc_feature (1244)..(1244): n is a, c, g, or t
  misc_feature (1251)..(1252): n is a, c, g, or t
  misc_feature (1266)..(1266): n is a, c, g, or t
  misc_feature (1278)..(1278): n is a, c, g, or t
  misc_feature (1283)..(1283): n is a, c, g, or t
  misc_feature (1287)..(1288): n is a, c, g, or t
  misc_feature (1295)..(1295): n is a, c, g, or t
  misc_feature (1310)..(1311): n is a, c, g, or t
  misc_feature (1315)..(1317): n is a, c, g, or t
  misc_feature (1325)..(1326): n is a, c, g, or t
  misc_feature (1331)..(1331): n is a, c, g, or t
  misc_feature (1344)..(1344): n is a, c, g, or t
attagagaaattactatgagaggatcgcatcaccatcaccatcacggatcctatttaggtgacactatagaatcgtcgacccacgcgtccggcggcaacggccccggcccacggaggcggctggacggacccccgacggttggacgtacggactctgcttcgagagtaggccatggacaccttcagcaccaagagcctggctctgcaggcgcagaagaagctcctgagtaagatggcgtccaaggcagtggtggccgtgctggtggatgacaccagcagtgaggtgctggatgagctgtaccgcgccaccagggagttcacgcgcagccgcaaggaggcccagaagatgctcaagaacctggtcaaggtggccctgaagctgggactgctgctgcgtggggaccagctgggcggtgaggagctggcgctgctgcggcgcttccgccaccgggcgcgctgcctggccatgacggccgtcagcttccaccaggtggacttcaccttcgaccggcgcgtgctggccgccgggctgctcgagtgccgcgacctgctgcaccaggccgtgggtccccacctgaccgccaagtcccacggccgcatcaaccacgtgttcggccacctagccgactgcgacttcctggctgcgctctacggccccgccgagccctaccgctcccacctgcgcaggatctgcgagggcctgggccggatgctggacgagggcagcctctgaaccccggcgccgcccaaccgcgcccctcgcgccttttggggctctcctgctgggtgcgggtggggtttgtgggtttttttccacctcttttctcccaatcggactccggccaaactcccctanacagatgggtgacctgtctcctttganangatgctgangcatctgtancanctgtttcaaacaccaatgtcacctctcctcctggcccccgcccnatggggaaaagaaatttggggccctactctggggaanacntttcacccntttgtactttntgggccacnccaacccctgggtccttngatgtaaaanccaaaagctgctgcctcccactngnattatgtcccctggaatttncatccctcncaaaagaatacggntncaacnggnaanttgggggaaaggaaatnttnaggggnaaattcnnggaccccccctttnanaaaatcanntntnanccccnnaaccnnaaaaaaaatttnttttnnaaanagnttntttnaanggnatttttnnaaaaattccctttnggaaaagggggncccanttannagggggnccttaaaaaaagggnngggnnngggggggnntcccntttaaccaaattn

SEQ ID NO: 975 - DNA, 1200 bp, Homo Sapiens
  misc_feature (4)..(4): n is a, c, g, or t
  misc_feature (88)..(88): n is a, c, g, or t
  misc_feature (695)..(695): n is a, c, g, or t
  misc_feature (717)..(717): n is a, c, g, or t
  misc_feature (727)..(727): n is a, c, g, or t
  misc_feature (835)..(835): n is a, c, g, or t
  misc_feature (837)..(837): n is a, c, g, or t
  misc_feature (848)..(848): n is a, c, g, or t
  misc_feature (867)..(867): n is a, c, g, or t
  misc_feature (875)..(875): n is a, c, g, or t
  misc_feature (877)..(877): n is a, c, g, or t
  misc_feature (896)..(896): n is a, c, g, or t
  misc_feature (899)..(899): n is a, c, g, or t
  misc_feature (904)..(904): n is a, c, g, or t
  misc_feature (906)..(906): n is a, c, g, or t
  misc_feature (908)..(908): n is a, c, g, or t
  misc_feature (918)..(918): n is a, c, g, or t
  misc_feature (922)..(922): n is a, c, g, or t
  misc_feature (933)..(933): n is a, c, g, or t
  misc_feature (943)..(943): n is a, c, g, or t
  misc_feature (946)..(946): n is a, c, g, or t
  misc_feature (951)..(951): n is a, c, g, or t
  misc_feature (953)..(953): n is a, c, g, or t
  misc_feature (959)..(959): n is a, c, g, or t
  misc_feature (962)..(962): n is a, c, g, or t
  misc_feature (964)..(964): n is a, c, g, or t
  misc_feature (979)..(979): n is a, c, g, or t
  misc_feature (982)..(983): n is a, c, g, or t
  misc_feature (997)..(997): n is a, c, g, or t
  misc_feature (1003)..(1003): n is a, c, g, or t
  misc_feature (1009)..(1009): n is a, c, g, or t
  misc_feature (1018)..(1018): n is a, c, g, or t
  misc_feature (1040)..(1040): n is a, c, g, or t
  misc_feature (1054)..(1055): n is a, c, g, or t
  misc_feature (1057)..(1058): n is a, c, g, or t
  misc_feature (1064)..(1064): n is a, c, g, or t
  misc_feature (1066)..(1066): n is a, c, g, or t
  misc_feature (1070)..(1070): n is a, c, g, or t
  misc_feature (1073)..(1073): n is a, c, g, or t
  misc_feature (1083)..(1084): n is a, c, g, or t
  misc_feature (1086)..(1086): n is a, c, g, or t
  misc_feature (1092)..(1092): n is a, c, g, or t
  misc_feature (1100)..(1101): n is a, c, g, or t
  misc_feature (1104)..(1104): n is a, c, g, or t
  misc_feature (1106)..(1106): n is a, c, g, or t
  misc_feature (1114)..(1114): n is a, c, g, or t
  misc_feature (1120)..(1120): n is a, c, g, or t
  misc_feature (1125)..(1125): n is a, c, g, or t
  misc_feature (1127)..(1127): n is a, c, g, or t
  misc_feature (1133)..(1133): n is a, c, g, or t
  misc_feature (1136)..(1138): n is a, c, g, or t
  misc_feature (1140)..(1140): n is a, c, g, or t
  misc_feature (1156)..(1156): n is a, c, g, or t
  misc_feature (1160)..(1160): n is a, c, g, or t
  misc_feature (1163)..(1163): n is a, c, g, or t
  misc_feature (1166)..(1167): n is a, c, g, or t
  misc_feature (1175)..(1175): n is a, c, g, or t
  misc_feature (1177)..(1177): n is a, c, g, or t
  misc_feature (1190)..(1190): n is a, c, g, or t
  misc_feature (1194)..(1194): n is a, c, g, or t
  misc_feature (1200)..(1200): n is a, c, g, or t
gaangagagattactatgagaggatcgcatcaccatcaccatcacggatcctatttaggtgacactatagaatcgtcgacccacgcgntccggccgccgccgcagagccggagcgggggccgccggcgccgcatccctctctacctgccaacatcctgtattagagaacttgtggccggaggtgtggctgtggagagctggccggggagggacgctgctcagctgctgctctgctcctgtctcctgtcccctcccccggtcatgacagagacccgtgagccagctgagactgggggctacgccagcttggaagaagatgatgaagacctttccccaggccccgagcattcctctgattcagaatacactctctcagagccggactccgaagaggaagaagatgaggaggaggaggaagaggagaccactgacgatcctgaatatgatcctggctacaaggtgaagcagcgccttggcgggggccgtggtggcccatcccgccgggccccccgtgcagcccagcccccggcccagccttgccagctctgtggccgctcaccccttggggaggccccaccgggaaccccaccctgccggctctgctgccctgctacagccccccaggaagcaccagcccctgaaggcagggccctcggggaggaagaggaggaaccacctcgggctggggagggccnaccagctgggcgggaggaggangaggaagagnaggaggagggaacctaccactgtacggaatgtgaggattccttcgacaacctggggggagctgcacgggcacttcattgcttgcatgtccggggtgaggtgtaagcananccccccatacngggaagctttggcaaaaangggtgggngntggttaggaagggggtctnaanaaaantngnggttgtgaanagtnggtcatggggnatggggttantgnccggntnctgtgnttntntttaaaaaattaaangtnntgaatggccaaaanaaaaangcccanaatttgttnaaaaaaaaaaaaaaaaagggcngggccgccttcccnnanntggagncntatnaancttaaataanntnaacttnggaccctnnttnanaaattccnaaaatnaaccncnaaaatnccnnntnggaatttttttaaaanaccncgnttnncccccggntntttttttttttgngtgnaaaatn

SEQ ID NO: 976 - DNA, 1444 bp, Homo Sapiens
  misc_feature (11)..(11): n is a, c, g, or t
  misc_feature (461)..(461): n is a, c, g, or t
  misc_feature (494)..(494): n is a, c, g, or t
  misc_feature (500)..(500): n is a, c, g, or t
  misc_feature (512)..(514): n is a, c, g, or t
  misc_feature (520)..(520): n is a, c, g, or t
  misc_feature (525)..(525): n is a, c, g, or t
  misc_feature (529)..(530): n is a, c, g, or t
  misc_feature (532)..(532): n is a, c, g, or t
  misc_feature (537)..(537): n is a, c, g, or t
  misc_feature (539)..(539): n is a, c, g, or t
  misc_feature (545)..(545): n is a, c, g, or t
  misc_feature (548)..(548): n is a, c, g, or t
  misc_feature (554)..(555): n is a, c, g, or t
  misc_feature (558)..(558): n is a, c, g, or t
  misc_feature (561)..(561): n is a, c, g, or t
  misc_feature (564)..(564): n is a, c, g, or t
  misc_feature (570)..(570): n is a, c, g, or t
  misc_feature (572)..(572): n is a, c, g, or t
  misc_feature (584)..(584): n is a, c, g, or t
  misc_feature (586)..(586): n is a, c, g, or t
  misc_feature (595)..(595): n is a, c, g, or t
  misc_feature (599)..(599): n is a, c, g, or t
  misc_feature (605)..(605): n is a, c, g, or t
  misc_feature (607)..(607): n is a, c, g, or t
  misc_feature (612)..(612): n is a, c, g, or t
  misc_feature (627)..(627): n is a, c, g, or t
  misc_feature (629)..(630): n is a, c, g, or t
  misc_feature (640)..(641): n is a, c, g, or t
  misc_feature (643)..(645): n is a, c, g, or t
  misc_feature (651)..(651): n is a, c, g, or t
  misc_feature (654)..(654): n is a, c, g, or t
  misc_feature (661)..(661): n is a, c, g, or t
  misc_feature (663)..(664): n is a, c, g, or t
  misc_feature (671)..(671): n is a, c, g, or t
  misc_feature (679)..(679): n is a, c, g, or t
  misc_feature (687)..(687): n is a, c, g, or t
  misc_feature (693)..(697): n is a, c, g, or t
  misc_feature (699)..(700): n is a, c, g, or t
  misc_feature (710)..(710): n is a, c, g, or t
  misc_feature (713)..(714): n is a, c, g, or t
  misc_feature (724)..(724): n is a, c, g, or t
  misc_feature (727)..(727): n is a, c, g, or t
  misc_feature (732)..(734): n is a, c, g, or t
  misc_feature (741)..(742): n is a, c, g, or t
  misc_feature (754)..(754): n is a, c, g, or t
  misc_feature (759)..(759): n is a, c, g, or t
  misc_feature (766)..(766): n is a, c, g, or t
  misc_feature (772)..(772): n is a, c, g, or t
  misc_feature (774)..(775): n is a, c, g, or t
  misc_feature (777)..(777): n is a, c, g, or t
  misc_feature (783)..(783): n is a, c, g, or t
  misc_feature (786)..(787): n is a, c, g, or t
  misc_feature (801)..(801): n is a, c, g, or t
  misc_feature (808)..(808): n is a, c, g, or t
  misc_feature (821)..(821): n is a, c, g, or t
  misc_feature (823)..(824): n is a, c, g, or t
  misc_feature (833)..(833): n is a, c, g, or t
  misc_feature (836)..(836): n is a, c, g, or t
  misc_feature (842)..(842): n is a, c, g, or t
  misc_feature (850)..(850): n is a, c, g, or t
  misc_feature (858)..(860): n is a, c, g, or t
  misc_feature (869)..(869): n is a, c, g, or t
  misc_feature (871)..(873): n is a, c, g, or t
  misc_feature (875)..(875): n is a, c, g, or t
  misc_feature (880)..(882): n is a, c, g, or t
  misc_feature (885)..(886): n is a, c, g, or t
  misc_feature (890)..(891): n is a, c, g, or t
  misc_feature (894)..(894): n is a, c, g, or t
  misc_feature (896)..(896): n is a, c, g, or t
  misc_feature (900)..(900): n is a, c, g, or t
  misc_feature (902)..(902): n is a, c, g, or t
  misc_feature (909)..(912): n is a, c, g, or t
  misc_feature (915)..(916): n is a, c, g, or t
  misc_feature (921)..(921): n is a, c, g, or t
  misc_feature (923)..(923): n is a, c, g, or t
  misc_feature (930)..(931): n is a, c, g, or t
  misc_feature (933)..(933): n is a, c, g, or t
  misc_feature (941)..(941): n is a, c, g, or t
  misc_feature (946)..(946): n is a, c, g, or t
  misc_feature (949)..(949): n is a, c, g, or t
  misc_feature (952)..(952): n is a, c, g, or t
  misc_feature (956)..(956): n is a, c, g, or t
  misc_feature (962)..(962): n is a, c, g, or t
  misc_feature (966)..(966): n is a, c, g, or t
  misc_feature (968)..(969): n is a, c, g, or t
  misc_feature (980)..(980): n is a, c, g, or t
  misc_feature (982)..(982): n is a, c, g, or t
  misc_feature (994)..(995): n is a, c, g, or t
  misc_feature (1005)..(1005): n is a, c, g, or t
  misc_feature (1010)..(1010): n is a, c, g, or t
  misc_feature (1014)..(1014): n is a, c, g, or t
  misc_feature (1020)..(1022): n is a, c, g, or t
  misc_feature (1027)..(1028): n is a, c, g, or t
  misc_feature (1031)..(1031): n is a, c, g, or t
  misc_feature (1034)..(1035): n is a, c, g, or t
  misc_feature (1037)..(1037): n is a, c, g, or t
  misc_feature (1044)..(1045): n is a, c, g, or t
  misc_feature (1049)..(1050): n is a, c, g, or t
  misc_feature (1052)..(1052): n is a, c, g, or t
  misc_feature (1060)..(1064): n is a, c, g, or t
  misc_feature (1068)..(1071): n is a, c, g, or t
  misc_feature (1075)..(1075): n is a, c, g, or t
  misc_feature (1082)..(1082): n is a, c, g, or t
  misc_feature (1088)..(1088): n is a, c, g, or t
  misc_feature (1095)..(1095): n is a, c, g, or t
  misc_feature (1099)..(1099): n is a, c, g, or t
  misc_feature (1104)..(1104): n is a, c, g, or t
  misc_feature (1106)..(1106): n is a, c, g, or t
  misc_feature (1109)..(1110): n is a, c, g, or t
  misc_feature (1116)..(1116): n is a, c, g, or t
  misc_feature (1121)..(1121): n is a, c, g, or t
  misc_feature (1128)..(1128): n is a, c, g, or t
  misc_feature (1135)..(1135): n is a, c, g, or t
  misc_feature (1146)..(1147): n is a, c, g, or t
  misc_feature (1154)..(1154): n is a, c, g, or t
  misc_feature (1157)..(1157): n is a, c, g, or t
  misc_feature (1159)..(1159): n is a, c, g, or t
  misc_feature (1162)..(1162): n is a, c, g, or t
  misc_feature (1175)..(1176): n is a, c, g, or t
  misc_feature (1181)..(1181): n is a, c, g, or t
  misc_feature (1190)..(1191): n is a, c, g, or t
  misc_feature (1201)..(1201): n is a, c, g, or t
  misc_feature (1213)..(1213): n is a, c, g, or t
  misc_feature (1215)..(1216): n is a, c, g, or t
  misc_feature (1219)..(1222): n is a, c, g, or t
  misc_feature (1230)..(1230): n is a, c, g, or t
  misc_feature (1232)..(1232): n is a, c, g, or t
  misc_feature (1236)..(1237): n is a, c, g, or t
  misc_feature (1243)..(1243): n is a, c, g, or t
  misc_feature (1272)..(1272): n is a, c, g, or t
  misc_feature (1281)..(1281): n is a, c, g, or t
  misc_feature (1290)..(1294): n is a, c, g, or t
  misc_feature (1296)..(1296): n is a, c, g, or t
  misc_feature (1302)..(1302): n is a, c, g, or t
  misc_feature (1308)..(1308): n is a, c, g, or t
  misc_feature (1310)..(1311): n is a, c, g, or t
  misc_feature (1314)..(1314): n is a, c, g, or t
  misc_feature (1322)..(1322): n is a, c, g, or t
  misc_feature (1328)..(1328): n is a, c, g, or t
  misc_feature (1330)..(1330): n is a, c, g, or t
  misc_feature (1341)..(1341): n is a, c, g, or t
  misc_feature (1345)..(1345): n is a, c, g, or t
  misc_feature (1350)..(1350): n is a, c, g, or t
  misc_feature (1359)..(1359): n is a, c, g, or t
  misc_feature (1364)..(1367): n is a, c, g, or t
  misc_feature (1371)..(1372): n is a, c, g, or t
  misc_feature (1379)..(1381): n is a, c, g, or t
  misc_feature (1389)..(1389): n is a, c, g, or t
  misc_feature (1391)..(1391): n is a, c, g, or t
  misc_feature (1393)..(1394): n is a, c, g, or t
  misc_feature (1397)..(1397): n is a, c, g, or t
  misc_feature (1399)..(1400): n is a, c, g, or t
  misc_feature (1402)..(1403): n is a, c, g, or t
  misc_feature (1407)..(1409): n is a, c, g, or t
  misc_feature (1412)..(1412): n is a, c, g, or t
  misc_feature (1415)..(1415): n is a, c, g, or t
  misc_feature (1418)..(1419): n is a, c, g, or t
  misc_feature (1421)..(1423): n is a, c, g, or t
  misc_feature (1431)..(1431): n is a, c, g, or t
  misc_feature (1434)..(1434): n is a, c, g, or t
  misc_feature (1443)..(1444): n is a, c, g, or t
tagagaaattnctatgagaggatcgcatcaccatcaccatcacggatcctatttaggtgacactatagaatcgtcgacccacgcgtccgtggggccctgccctcccgtgggagttgtggactcgagcccaggggctgcccgtcacagcggtgtcccaggtccctgccatccgattttacctgggatgtcttctctggagtttggaattgcttgaggaaccctgcgtgtgcttggagaggccagagggcttgctgagaaccccatggacagtggagagcgggattcgaaccaagggctggactcccacacctctggcctgcgtcgcccagttctttgtggctctgaagaattggccgctgtggaaaagagcaaatgtccgagacccccaacaggaagagtctaaaaatccagtttgcaaccacttctgacctacaaaaaaatggaaatttagtgtttttcancctaagacattaaatttcatatcggagaaaaanaaaaanaaaaaaaaaaannnaaaaanaaaanaaanncnaaacnanataaanaanaaaatnnaanaanatnaaaaananaaaaatgggggngnccccccccnaaanggaggncnaaatnaaccttaattaccgnannttggaacccnngnnnaaaaanccngaaatgncnncaaaacnccttcggnattttttnaaaacnnnnngnngcccgccggngcnntttttttttnggngaaannncaaaccnncttttggggaanttttnaggactntaaggnanncntaaagnggnnaaaaaaaaatctcntggaaanaaccccccctttnannttccccaanggnagtcanaaaaaaanatttttgnnnggctttttnannncntgttnnntcnngggnnccnanaaancnaaaactnnnncanngggananataaggnncnttttttanaaaanccngtnaaanaaaaantaancnncaagttttttncnggcccttttttnnaatttttttnccccncccnaaaaannnccccnnccncgnnanttttctnntggnnanataaaaannnnnggannnngggntaagganataatntggttcncccnttttnanacnntttttncatgnaaaaaantaaaaanttttttcccgnnttggggnggnanaanacagaaaaaattnncggtnttttttcannatattattcnccaaaaagtggngnnttnnnnggaaaaancntgcnntttttncccaaggttatttggaaaaatatttttcncccccaacnacccggggnnnnngnctcacnttttanannccnggccaaangataanantctttcccccncttntcccngggaaaaanatttnnnngcgnnagggggnnnagtcgcgngnanncantnncnncccnnnaanctnccnncnnncaagtatnaanattccaaann

SEQ ID NO: 977 - DNA, 1195 bp, Homo Sapiens
  misc_feature (806)..(806): n is a, c, g, or t
  misc_feature (874)..(874): n is a, c, g, or t
  misc_feature (895)..(895): n is a, c, g, or t
  misc_feature (909)..(909): n is a, c, g, or t
  misc_feature (940)..(940): n is a, c, g, or t
  misc_feature (944)..(946): n is a, c, g, or t
  misc_feature (968)..(968): n is a, c, g, or t
  misc_feature (970)..(970): n is a, c, g, or t
  misc_feature (1005)..(1005): n is a, c, g, or t
  misc_feature (1013)..(1013): n is a, c, g, or t
  misc_feature (1019)..(1019): n is a, c, g, or t
  misc_feature (1021)..(1021): n is a, c, g, or t
  misc_feature (1023)..(1023): n is a, c, g, or t
  misc_feature (1030)..(1030): n is a, c, g, or t
  misc_feature (1039)..(1039): n is a, c, g, or t
  misc_feature (1050)..(1050): n is a, c, g, or t
  misc_feature (1059)..(1059): n is a, c, g, or t
  misc_feature (1062)..(1062): n is a, c, g, or t
  misc_feature (1064)..(1064): n is a, c, g, or t
  misc_feature (1066)..(1066): n is a, c, g, or t
  misc_feature (1074)..(1074): n is a, c, g, or t
  misc_feature (1078)..(1078): n is a, c, g, or t
  misc_feature (1081)..(1081): n is a, c, g, or t
  misc_feature (1084)..(1084): n is a, c, g, or t
  misc_feature (1086)..(1087): n is a, c, g, or t
  misc_feature (1090)..(1090): n is a, c, g, or t
  misc_feature (1100)..(1100): n is a, c, g, or t
  misc_feature (1103)..(1103): n is a, c, g, or t
  misc_feature (1117)..(1117): n is a, c, g, or t
  misc_feature (1120)..(1120): n is a, c, g, or t
  misc_feature (1124)..(1124): n is a, c, g, or t
  misc_feature (1127)..(1127): n is a, c, g, or t
  misc_feature (1138)..(1139): n is a, c, g, or t
  misc_feature (1165)..(1165): n is a, c, g, or t
  misc_feature (1171)..(1171): n is a, c, g, or t
  misc_feature (1186)..(1186): n is a, c, g, or t
  misc_feature (1192)..(1192): n is a, c, g, or t
agagaaattactatgagaggatcgcatcaccatcaccatcacggatcctatttaggtgacactatagaatcgtcgacccacgcgtccgcggtggcggaggcgacctcgcgacctgtgtcagcagagccgccctgcaccaccatgtgcatcatcttctttaagtttgatcctcgccctgtttccaaaaacgcgtacaggctcatcttggcagccaacagggatgaattctacagccgaccctccaagttagctgacttctgggggaacaacaacgagatcctcagtgggctggacatggaggaaggcaaggaaggaggcacatggctgggcatcagcacacgtggcaagctggcagcactcaccaactacctgcagccgcagctggactggcaggcccgagggcgaggtgaacttgtcacccactttctgaccactgacgtggacagcttgtcctacctgaagaaggtctctatggagggccatctgtacaatggcttcaacctcatagcagccgacctgagcacagcaaagggagacgtcatttgctactatgggaaccgaggggagcctgatcctatcgttttgacgccaggcacctacgggctgagcaacgcgctgctggagactccctggaggaagctgtgctttgggaagcagctcttcctggaggctgtggaacggagccaggcgctgcccaaggatgtgctcatcgccagcctcctggatgtgctcaacaatgaagaggcgcagctgccagacccggccatcgaggaccagggtggggagtacgtgcagcccatgctgancaagtacgcggctgtgtgcgtgcgctgccctggctacggcaccagaaccaacactatcatcctggtanatgcggacggccacgtgaccnttcactgagcgtancatgatggacaaggacctctcccactggganaacnnnaacctatgagttcacactgcananctaaccccacctctgggcctggccaggggggctcntggggggnccctgncntngaggggncactggggnaaaggaaaacntttcctttngcnananttgcattngcantgnccngnnggnttgggccaanatncccccgggaataanggncccntgngggtttggggnnttaacccatttggggttcccccaggncccaantttaggggtttgccntttttngcc

SEQ ID NO: 978 - DNA, 1200 bp, Homo Sapiens
  misc_feature (1)..(1): n is a, c, g, or t
  misc_feature (17)..(17): n is a, c, g, or t
  misc_feature (869)..(869): n is a, c, g, or t
  misc_feature (886)..(886): n is a, c, g, or t
  misc_feature (910)..(910): n is a, c, g, or t
  misc_feature (981)..(981): n is a, c, g, or t
  misc_feature (983)..(983): n is a, c, g, or t
  misc_feature (998)..(998): n is a, c, g, or t
  misc_feature (1025)..(1025): n is a, c, g, or t
  misc_feature (1064)..(1064): n is a, c, g, or t
  misc_feature (1066)..(1066): n is a, c, g, or t
  misc_feature (1097)..(1097): n is a, c, g, or t
  misc_feature (1101)..(1101): n is a, c, g, or t
  misc_feature (1120)..(1120): n is a, c, g, or t
  misc_feature (1130)..(1130): n is a, c, g, or t
  misc_feature (1136)..(1136): n is a, c, g, or t
  misc_feature (1152)..(1152): n is a, c, g, or t
  misc_feature (1158)..(1158): n is a, c, g, or t
  misc_feature (1166)..(1166): n is a, c, g, or t
  misc_feature (1188)..(1188): n is a, c, g, or t
naattagaggaaattanctatgagaggatcgcatcaccattcaccatcacggatcctatttaggtgacactatagaatcgtcgacccacgcgtccggtgaacgcgctggctgccggcagcgagaaatgatgaaactgacctgtgaacgctgtagccgaaacttctgcatcaagcaccggcatccactggaccatgattgctctggggaggggcacccaaccagccgggcaggacttgctgccatctccagagcacaagctgtggcttctacaagcactgtccccagcccaagtcaaaccatgccttcctgtacctctcccagcagagccacaacccgatctccgtcctggacagcccctccagtgattgctttgcagaatggcctgagtgaggatgaagctctgcagcgggccctggaaatgtccctggcagaaaccaaaccccaggttccaaggtaccttaccctcttgtgaaagagagcgcaagctgtgggcaagggcttggtctggaggcaggtaggtgggaccactctgacacaatgcaagataatcgctggcaacttggtctcaaaattaagatgaactatatgatctttgacaagttatttaacccatggagccttcatttcctctataaaacggggacaatactaatacccaccttgtagtgttgctatgaagattgagataatcctcagcagtgctcagcaccatgaggcccaacacacacagatcagatgttcaaatttcagatcttaccatcatccaacttaaactgtttctccctcccagttgtcaggaggaagaagacctagctttagcacaagcactgtcagccagtgaggcagaataccagcggcagcaggcccnagagccgcagctcgaanccgtccaactgcagcctgtgctanggccctgggcttggggagggaggttcacctgaagaggactgtggccttcacacctctagggtacacagggnanaagaaggcccgggancaccctggagggcaaaaacaaacgggnaatgatgtggaaggtccccctgggaacctctggaaggcntngctaatgctccccctgcatggaaaaaaacgnctancaactgttccctggttggnccccatggangctggncaggcctaatcttaancccctnaaaaaggncacccccttaagcgggaacttnccccaattggaa

SEQ ID NO: 979 - DNA, 1200 bp, Homo Sapiens
  misc_feature (791)..(791): n is a, c, g, or t
  misc_feature (836)..(836): n is a, c, g, or t
  misc_feature (897)..(897): n is a, c, g, or t
  misc_feature (915)..(915): n is a, c, g, or t
  misc_feature (924)..(924): n is a, c, g, or t
  misc_feature (928)..(928): n is a, c, g, or t
  misc_feature (933)..(933): n is a, c, g, or t
  misc_feature (944)..(944): n is a, c, g, or t
  misc_feature (948)..(949): n is a, c, g, or t
  misc_feature (956)..(956): n is a, c, g, or t
  misc_feature (963)..(963): n is a, c, g, or t
  misc_feature (979)..(979): n is a, c, g, or t
  misc_feature (988)..(988): n is a, c, g, or t
  misc_feature (993)..(993): n is a, c, g, or t
  misc_feature (1008)..(1008): n is a, c, g, or t
  misc_feature (1013)..(1013): n is a, c, g, or t
  misc_feature (1016)..(1016): n is a, c, g, or t
  misc_feature (1019)..(1019): n is a, c, g, or t
  misc_feature (1021)..(1021): n is a, c, g, or t
  misc_feature (1026)..(1026): n is a, c, g, or t
  misc_feature (1034)..(1034): n is a, c, g, or t
  misc_feature (1036)..(1036): n is a, c, g, or t
  misc_feature (1044)..(1044): n is a, c, g, or t
  misc_feature (1047)..(1047): n is a, c, g, or t
  misc_feature (1049)..(1051): n is a, c, g, or t
  misc_feature (1053)..(1053): n is a, c, g, or t
  misc_feature (1066)..(1066): n is a, c, g, or t
  misc_feature (1070)..(1070): n is a, c, g, or t
  misc_feature (1074)..(1075): n is a, c, g, or t
  misc_feature (1078)..(1078): n is a, c, g, or t
  misc_feature (1080)..(1080): n is a, c, g, or t
  misc_feature (1082)..(1083): n is a, c, g, or t
  misc_feature (1089)..(1089): n is a, c, g, or t
  misc_feature (1091)..(1091): n is a, c, g, or t
  misc_feature (1111)..(1111): n is a, c, g, or t
  misc_feature (1116)..(1116): n is a, c, g, or t
  misc_feature (1119)..(1120): n is a, c, g, or t
  misc_feature (1123)..(1123): n is a, c, g, or t
  misc_feature (1126)..(1126): n is a, c, g, or t
  misc_feature (1128)..(1128): n is a, c, g, or t
  misc_feature (1131)..(1132): n is a, c, g, or t
  misc_feature (1137)..(1137): n is a, c, g, or t
  misc_feature (1141)..(1141): n is a, c, g, or t
  misc_feature (1152)..(1152): n is a, c, g, or t
  misc_feature (1159)..(1159): n is a, c, g, or t
  misc_feature (1162)..(1162): n is a, c, g, or t
  misc_feature (1170)..(1170): n is a, c, g, or t
  misc_feature (1172)..(1172): n is a, c, g, or t
  misc_feature (1176)..(1176): n is a, c, g, or t
  misc_feature (1181)..(1182): n is a, c, g, or t
  misc_feature (1184)..(1184): n is a, c, g, or t
  misc_feature (1196)..(1196): n is a, c, g, or t
tagagaaattactatgagaggatcgcatcaccatcaccatcacggatcctatttaggtgacactatagaatcgtcgacccacgcgtccggaccaaggcatcaccctcgggagcccacagagacacgacgccagggctcctccaccactagcctgcggccccagtgaatctaccctaaaagaaggaatcccaggtcccagaaatctggatcttcctggtttgtgggacgtccccgcctgggagagcacccagcacccttggcctgtctgcggggaaagctgttgggagaacaaccatttagtaatgcaccagagaggccactcaaaggaccggacacgtagggcctgggagaaattcaacaagagggcggagacgcagatgccgtggagcagccctcgggtacagaggcacttccggtgtggcgtgtgcggtaagagcttccgccggaagctgtgtctgctgcgccatctggcggcccacacggggaggggccccttccggaacgctggcggtgaaatgtgcttccgacacgagctgacccatcccagccaccgcctcccgcagcagggggagaagcctgcccagtgcaccccatgcggcaagcgctccctcccagtggacagcacgcaggctcgccggtgccagcacagccgggaggggccggcctcttggagagaaggccgcggggcctccagcagtgtgcactcgggacagaaaccaggctcgcgcctgccccaggaggggaacagccaccaggaaggggacacggaggcgctgcagcatggcgcaaangggccctgctcctgctcggagtgtggcgagcgctccccttatgancgccaggctcgccagccccttgcagggcgcatactggaaaaaaagccccttccagtgtgcncattgcaccaagcgcttncgcctggcnccgncctgnttgcaggtccnccanncacgccncacgggnggggaaaaaaccgttnttcttgcangaaantgtggcaagggcttnccccnaancantntaaantcccggancncatttcanttncnnngnggaaaaaaaaccntttncggnngtncnannggtggnangaactttccttcaaaagggnaaaanttnntgnggnancannggttngaanggaaaaaaaanccttttnatncccaaaantngggntgaanntnccccttgaaaanattt

SEQ ID NO: 980 - DNA, 1315 bp, Homo Sapiens
  misc_feature (841)..(841): n is a, c, g, or t
  misc_feature (896)..(896): n is a, c, g, or t
  misc_feature (943)..(943): n is a, c, g, or t
  misc_feature (947)..(947): n is a, c, g, or t
  misc_feature (953)..(953): n is a, c, g, or t
  misc_feature (955)..(955): n is a, c, g, or t
  misc_feature (965)..(965): n is a, c, g, or t
  misc_feature (971)..(971): n is a, c, g, or t
  misc_feature (989)..(989): n is a, c, g, or t
  misc_feature (1024)..(1024): n is a, c, g, or t
  misc_feature (1040)..(1040): n is a, c, g, or t
  misc_feature (1045)..(1045): n is a, c, g, or t
  misc_feature (1049)..(1049): n is a, c, g, or t
  misc_feature (1052)..(1052): n is a, c, g, or t
  misc_feature (1057)..(1057): n is a, c, g, or t
  misc_feature (1070)..(1070): n is a, c, g, or t
  misc_feature (1078)..(1078): n is a, c, g, or t
  misc_feature (1088)..(1088): n is a, c, g, or t
  misc_feature (1112)..(1112): n is a, c, g, or t
  misc_feature (1119)..(1119): n is a, c, g, or t
  misc_feature (1121)..(1121): n is a, c, g, or t
  misc_feature (1123)..(1123): n is a, c, g, or t
  misc_feature (1130)..(1130): n is a, c, g, or t
  misc_feature (1150)..(1150): n is a, c, g, or t
  misc_feature (1153)..(1153): n is a, c, g, or t
  misc_feature (1161)..(1161): n is a, c, g, or t
  misc_feature (1164)..(1164): n is a, c, g, or t
  misc_feature (1168)..(1168): n is a, c, g, or t
  misc_feature (1170)..(1170): n is a, c, g, or t
  misc_feature (1173)..(1173): n is a, c, g, or t
  misc_feature (1178)..(1179): n is a, c, g, or t
  misc_feature (1186)..(1186): n is a, c, g, or t
  misc_feature (1195)..(1195): n is a, c, g, or t
  misc_feature (1198)..(1199): n is a, c, g, or t
  misc_feature (1203)..(1203): n is a, c, g, or t
  misc_feature (1209)..(1209): n is a, c, g, or t
  misc_feature (1216)..(1216): n is a, c, g, or t
  misc_feature (1223)..(1224): n is a, c, g, or t
  misc_feature (1230)..(1230): n is a, c, g, or t
  misc_feature (1232)..(1232): n is a, c, g, or t
  misc_feature (1234)..(1234): n is a, c, g, or t
  misc_feature (1237)..(1237): n is a, c, g, or t
  misc_feature (1249)..(1250): n is a, c, g, or t
  misc_feature (1258)..(1258): n is a, c, g, or t
  misc_feature (1263)..(1263): n is a, c, g, or t
  misc_feature (1273)..(1273): n is a, c, g, or t
  misc_feature (1276)..(1276): n is a, c, g, or t
  misc_feature (1279)..(1282): n is a, c, g, or t
  misc_feature (1285)..(1285): n is a, c, g, or t
  misc_feature (1287)..(1287): n is a, c, g, or t
  misc_feature (1295)..(1295): n is a, c, g, or t
agaaattactatgagaggatcgcatcaccatcaccatcacggatcctatttaggtgacactatagaatcgtcgacccacgcgtccggccttctggtggtgggcacaactgtggtgggatacttgccaaatgggaggtttaaggagttcatgagtaaacatgttcacttaatgtgttaccggatctgcgtgcgagcgctgacagccatcatcacctaccatgacagggaaaacagaccaagaaatggtggcatctgtgtggccaatcatacctcaccgatcgatgtgatcatcttggccagcgatggctattatgccatggtgggtcaagtgcacgggggactcatgggtgtgattcagagagccatggtgaaggcctgcccacacgtctggtttgagcgctcggaagtgaaggatcgccacctggtggctaagagactgactgaacatgtgcaagataaaagcaagctgcctatcctcatcttcccagaaggaacctgcatcaataatacatcggtgatgatgttcaaaaagggaagttttgaaattggagccacagtttaccctgttgctatcaagtatgaccctcaatttggcgatgccttctggaacagcagcaaatacgggatggtgacgtacctgctgcgaatgatgaccagctgggccattgtctgcagcgtgtggtacctgcctcccatgactagagaggcagatgaagatgctgtccagtttgcgaatagggtgaaatctgccattgccaggcagggaggacttgtggacctgctgtgggatgggggcctgaagagggagaaggtgaaggacacgttcaaggaggagcagcanaagctgtacagcaagatgatcgtggggaaccacaaggacaggagccgctcctgancctgcctccagctggctggggcccccgtgcggggtgccaccgggctnaaanctggantngccgcccccncccccnctgctgtgtcctttccanactccagggctccccgggctgctctggatcccagnactccggctttccccnaaccncacnggnatccntgtgcacccgggncaacctanccttgggggnctaaacggatgctgctgggtgttnccacccnananaaaaagnccttgtttttttaaaaaaantcnttggaagnaangccntnaanggaannccccccntttcccccnttnncggnctaaangtttggnaaaaatnnccctgncntnttntaaaaaaggggnnaaaaaatnttttnttaacccccnttnccnnnnaantntgggggcncccccccccccccaaaaaaa

SEQ ID NO: 981 - DNA, 1712 bp, Homo Sapiens
  misc_feature (2)..(2): n is a, c, g, or t
  misc_feature (5)..(6): n is a, c, g, or t
  misc_feature (8)..(8): n is a, c, g, or t
  misc_feature (18)..(18): n is a, c, g, or t
  misc_feature (20)..(20): n is a, c, g, or t
  misc_feature (28)..(28): n is a, c, g, or t
  misc_feature (34)..(34): n is a, c, g, or t
  misc_feature (53)..(53): n is a, c, g, or t
  misc_feature (67)..(68): n is a, c, g, or t
  misc_feature (86)..(86): n is a, c, g, or t
  misc_feature (89)..(91): n is a, c, g, or t
  misc_feature (121)..(121): n is a, c, g, or t
  misc_feature (124)..(126): n is a, c, g, or t
  misc_feature (132)..(132): n is a, c, g, or t
  misc_feature (142)..(142): n is a, c, g, or t
  misc_feature (148)..(148): n is a, c, g, or t
  misc_feature (155)..(155): n is a, c, g, or t
  misc_feature (160)..(160): n is a, c, g, or t
  misc_feature (170)..(170): n is a, c, g, or t
  misc_feature (173)..(174): n is a, c, g, or t
  misc_feature (185)..(185): n is a, c, g, or t
  misc_feature (187)..(188): n is a, c, g, or t
  misc_feature (193)..(193): n is a, c, g, or t
  misc_feature (195)..(197): n is a, c, g, or t
  misc_feature (211)..(211): n is a, c, g, or t
  misc_feature (214)..(214): n is a, c, g, or t
  misc_feature (219)..(219): n is a, c, g, or t
  misc_feature (221)..(221): n is a, c, g, or t
  misc_feature (232)..(232): n is a, c, g, or t
  misc_feature (234)..(234): n is a, c, g, or t
  misc_feature (237)..(237): n is a, c, g, or t
  misc_feature (242)..(242): n is a, c, g, or t
  misc_feature (245)..(247): n is a, c, g, or t
  misc_feature (252)..(252): n is a, c, g, or t
  misc_feature (256)..(256): n is a, c, g, or t
  misc_feature (260)..(260): n is a, c, g, or t
  misc_feature (267)..(268): n is a, c, g, or t
  misc_feature (270)..(270): n is a, c, g, or t
  misc_feature (272)..(272): n is a, c, g, or t
  misc_feature (277)..(277): n is a, c, g, or t
  misc_feature (280)..(280): n is a, c, g, or t
  misc_feature (283)..(285): n is a, c, g, or t
  misc_feature (289)..(292): n is a, c, g, or t
  misc_feature (294)..(294): n is a, c, g, or t
  misc_feature (297)..(297): n is a, c, g, or t
  misc_feature (299)..(299): n is a, c, g, or t
  misc_feature (301)..(301): n is a, c, g, or t
  misc_feature (303)..(303): n is a, c, g, or t
  misc_feature (306)..(306): n is a, c, g, or t
  misc_feature (311)..(311): n is a, c, g, or t
  misc_feature (315)..(315): n is a, c, g, or t
  misc_feature (317)..(317): n is a, c, g, or t
  misc_feature (320)..(320): n is a, c, g, or t
  misc_feature (327)..(328): n is a, c, g, or t
  misc_feature (331)..(331): n is a, c, g, or t
  misc_feature (334)..(335): n is a, c, g, or t
  misc_feature (340)..(340): n is a, c, g, or t
  misc_feature (349)..(349): n is a, c, g, or t
  misc_feature (351)..(351): n is a, c, g, or t
  misc_feature (353)..(354): n is a, c, g, or t
  misc_feature (358)..(358): n is a, c, g, or t
  misc_feature (362)..(362): n is a, c, g, or t
  misc_feature (365)..(365): n is a, c, g, or t
  misc_feature (371)..(371): n is a, c, g, or t
  misc_feature (373)..(373): n is a, c, g, or t
  misc_feature (378)..(378): n is a, c, g, or t
  misc_feature (384)..(384): n is a, c, g, or t
  misc_feature (387)..(389): n is a, c, g, or t
  misc_feature (393)..(393): n is a, c, g, or t
  misc_feature (395)..(397): n is a, c, g, or t
  misc_feature (399)..(400): n is a, c, g, or t
  misc_feature (406)..(406): n is a, c, g, or t
  misc_feature (409)..(410): n is a, c, g, or t
  misc_feature (420)..(422): n is a, c, g, or t
  misc_feature (424)..(425): n is a, c, g, or t
  misc_feature (427)..(427): n is a, c, g, or t
  misc_feature (432)..(433): n is a, c, g, or t
  misc_feature (435)..(435): n is a, c, g, or t
  misc_feature (439)..(439): n is a, c, g, or t
  misc_feature (445)..(445): n is a, c, g, or t
  misc_feature (448)..(449): n is a, c, g, or t
  misc_feature (451)..(451): n is a, c, g, or t
  misc_feature (453)..(454): n is a, c, g, or t
  misc_feature (461)..(462): n is a, c, g, or t
  misc_feature (467)..(467): n is a, c, g, or t
  misc_feature (469)..(470): n is a, c, g, or t
  misc_feature (472)..(472): n is a, c, g, or t
  misc_feature (485)..(485): n is a, c, g, or t
  misc_feature (487)..(490): n is a, c, g, or t
  misc_feature (492)..(494): n is a, c, g, or t
  misc_feature (496)..(496): n is a, c, g, or t
  misc_feature (499)..(499): n is a, c, g, or t
  misc_feature (501)..(502): n is a, c, g, or t
  misc_feature (505)..(506): n is a, c, g, or t
  misc_feature (509)..(509): n is a, c, g, or t
  misc_feature (512)..(513): n is a, c, g, or t
  misc_feature (519)..(519): n is a, c, g, or t
  misc_feature (521)..(522): n is a, c, g, or t
  misc_feature (524)..(526): n is a, c, g, or t
  misc_feature (528)..(530): n is a, c, g, or t
  misc_feature (534)..(536): n is a, c, g, or t
  misc_feature (543)..(544): n is a, c, g, or t
  misc_feature (546)..(546): n is a, c, g, or t
  misc_feature (550)..(550): n is a, c, g, or t
  misc_feature (552)..(552): n is a, c, g, or t
  misc_feature (563)..(563): n is a, c, g, or t
  misc_feature (566)..(567): n is a, c, g, or t
  misc_feature (569)..(569): n is a, c, g, or t
  misc_feature (574)..(574): n is a, c, g, or t
  misc_feature (581)..(581): n is a, c, g, or t
  misc_feature (584)..(586): n is a, c, g, or t
  misc_feature (588)..(590): n is a, c, g, or t
  misc_feature (594)..(595): n is a, c, g, or t
  misc_feature (597)..(599): n is a, c, g, or t
  misc_feature (603)..(604): n is a, c, g, or t
  misc_feature (611)..(611): n is a, c, g, or t
  misc_feature (614)..(615): n is a, c, g, or t
  misc_feature (617)..(617): n is a, c, g, or t
  misc_feature (621)..(621): n is a, c, g, or t
  misc_feature (623)..(624): n is a, c, g, or t
  misc_feature (628)..(629): n is a, c, g, or t
  misc_feature (631)..(632): n is a, c, g, or t
  misc_feature (638)..(639): n is a, c, g, or t
  misc_feature (641)..(642): n is a, c, g, or t
  misc_feature (646)..(647): n is a, c, g, or t
  misc_feature (650)..(653): n is a, c, g, or t
  misc_feature (656)..(656): n is a, c, g, or t
  misc_feature (658)..(660): n is a, c, g, or t
  misc_feature (665)..(667): n is a, c, g, or t
  misc_feature (669)..(669): n is a, c, g, or t
  misc_feature (673)..(674): n is a, c, g, or t
  misc_feature (680)..(684): n is a, c, g, or t
  misc_feature (689)..(689): n is a, c, g, or t
  misc_feature (692)..(693): n is a, c, g, or t
  misc_feature (696)..(696): n is a, c, g, or t
  misc_feature (698)..(698): n is a, c, g, or t
  misc_feature (700)..(701): n is a, c, g, or t
  misc_feature (703)..(703): n is a, c, g, or t
  misc_feature (707)..(707): n is a, c, g, or t
  misc_feature (709)..(709): n is a, c, g, or t
  misc_feature (711)..(711): n is a, c, g, or t
  misc_feature (713)..(713): n is a, c, g, or t
  misc_feature (721)..(721): n is a, c, g, or t
  misc_feature (724)..(724): n is a, c, g, or t
  misc_feature (726)..(726): n is a, c, g, or t
  misc_feature (730)..(730): n is a, c, g, or t
  misc_feature (733)..(733): n is a, c, g, or t
  misc_feature (740)..(741): n is a, c, g, or t
  misc_feature (743)..(743): n is a, c, g, or t
  misc_feature (748)..(748): n is a, c, g, or t
  misc_feature (753)..(753): n is a, c, g, or t
  misc_feature (760)..(761): n is a, c, g, or t
  misc_feature (768)..(768): n is a, c, g, or t
  misc_feature (770)..(770): n is a, c, g, or t
  misc_feature (774)..(777): n is a, c, g, or t
  misc_feature (780)..(780): n is a, c, g, or t
  misc_feature (784)..(786): n is a, c, g, or t
  misc_feature (789)..(789): n is a, c, g, or t
  misc_feature (791)..(792): n is a, c, g, or t
  misc_feature (795)..(796): n is a, c, g, or t
  misc_feature (798)..(798): n is a, c, g, or t
  misc_feature (801)..(801): n is a, c, g, or t
  misc_feature (806)..(806): n is a, c, g, or t
  misc_feature (809)..(809): n is a, c, g, or t
  misc_feature (814)..(815): n is a, c, g, or t
  misc_feature (825)..(826): n is a, c, g, or t
  misc_feature (832)..(832): n is a, c, g, or t
  misc_feature (834)..(834): n is a, c, g, or t
  misc_feature (836)..(836): n is a, c, g, or t
  misc_feature (841)..(845): n is a, c, g, or t
  misc_feature (847)..(848): n is a, c, g, or t
  misc_feature (850)..(850): n is a, c, g, or t
  misc_feature (852)..(852): n is a, c, g, or t
  misc_feature (855)..(856): n is a, c, g, or t
  misc_feature (858)..(858): n is a, c, g, or t
  misc_feature (861)..(862): n is a, c, g, or t
  misc_feature (864)..(865): n is a, c, g, or t
  misc_feature (868)..(870): n is a, c, g, or t
  misc_feature (876)..(877): n is a, c, g, or t
  misc_feature (880)..(880): n is a, c, g, or t
  misc_feature (883)..(884): n is a, c, g, or t
  misc_feature (886)..(888): n is a, c, g, or t
  misc_feature (893)..(893): n is a, c, g, or t
  misc_feature (895)..(895): n is a, c, g, or t
  misc_feature (898)..(898): n is a, c, g, or t
  misc_feature (901)..(901): n is a, c, g, or t
  misc_feature (903)..(903): n is a, c, g, or t
  misc_feature (906)..(909): n is a, c, g, or t
  misc_feature (911)..(913): n is a, c, g, or t
  misc_feature (916)..(916): n is a, c, g, or t
  misc_feature (918)..(918): n is a, c, g, or t
  misc_feature (921)..(922): n is a, c, g, or t
  misc_feature (927)..(927): n is a, c, g, or t
  misc_feature (932)..(932): n is a, c, g, or t
  misc_feature (935)..(935): n is a, c, g, or t
  misc_feature (941)..(941): n is a, c, g, or t
  misc_feature (943)..(945): n is a, c, g, or t
  misc_feature (947)..(948): n is a, c, g, or t
  misc_feature (952)..(952): n is a, c, g, or t
  misc_feature (958)..(958): n is a, c, g, or t
  misc_feature (963)..(963): n is a, c, g, or t
  misc_feature (965)..(965): n is a, c, g, or t
  misc_feature (969)..(969): n is a, c, g, or t
  misc_feature (972)..(972): n is a, c, g, or t
  misc_feature (974)..(974): n is a, c, g, or t
  misc_feature (978)..(980): n is a, c, g, or t
  misc_feature (982)..(982): n is a, c, g, or t
  misc_feature (984)..(986): n is a, c, g, or t
  misc_feature (989)..(991): n is a, c, g, or t
  misc_feature (995)..(995): n is a, c, g, or t
  misc_feature (998)..(998): n is a, c, g, or t
  misc_feature (1001)..(1002): n is a, c, g, or t
  misc_feature (1004)..(1005): n is a, c, g, or t
  misc_feature (1008)..(1009): n is a, c, g, or t
  misc_feature (1011)..(1011): n is a, c, g, or t
  misc_feature (1016)..(1017): n is a, c, g, or t
  misc_feature (1019)..(1019): n is a, c, g, or t
  misc_feature (1022)..(1022): n is a, c, g, or t
  misc_feature (1025)..(1026): n is a, c, g, or t
  misc_feature (1029)..(1032): n is a, c, g, or t
  misc_feature (1034)..(1040): n is a, c, g, or t
  misc_feature (1043)..(1043): n is a, c, g, or t
  misc_feature (1045)..(1045): n is a, c, g, or t
  misc_feature (1049)..(1049): n is a, c, g, or t
  misc_feature (1053)..(1054): n is a, c, g, or t
  misc_feature (1060)..(1062): n is a, c, g, or t
  misc_feature (1065)..(1065): n is a, c, g, or t
  misc_feature (1067)..(1067): n is a, c, g, or t
  misc_feature (1071)..(1071): n is a, c, g, or t
  misc_feature (1076)..(1077): n is a, c, g, or t
  misc_feature (1080)..(1080): n is a, c, g, or t
  misc_feature (1084)..(1084): n is a, c, g, or t
  misc_feature (1088)..(1088): n is a, c, g, or t
  misc_feature (1090)..(1090): n is a, c, g, or t
  misc_feature (1095)..(1095): n is a, c, g, or t
  misc_feature (1099)..(1100): n is a, c, g, or t
  misc_feature (1104)..(1104): n is a, c, g, or t
  misc_feature (1109)..(1111): n is a, c, g, or t
  misc_feature (1115)..(1116): n is a, c, g, or t
  misc_feature (1121)..(1121): n is a, c, g, or t
  misc_feature (1127)..(1127): n is a, c, g, or t
  misc_feature (1133)..(1134): n is a, c, g, or t
  misc_feature (1139)..(1139): n is a, c, g, or t
  misc_feature (1141)..(1141): n is a, c, g, or t
  misc_feature (1144)..(1144): n is a, c, g, or t
  misc_feature (1147)..(1147): n is a, c, g, or t
  misc_feature (1150)..(1150): n is a, c, g, or t
  misc_feature (1154)..(1154): n is a, c, g, or t
  misc_feature (1158)..(1159): n is a, c, g, or t
  misc_feature (1162)..(1162): n is a, c, g, or t
  misc_feature (1165)..(1165): n is a, c, g, or t
  misc_feature (1168)..(1168): n is a, c, g, or t
  misc_feature (1172)..(1172): n is a, c, g, or t
  misc_feature (1174)..(1174): n is a, c, g, or t
  misc_feature (1178)..(1178): n is a, c, g, or t
  misc_feature (1180)..(1180): n is a, c, g, or t
  misc_feature (1182)..(1183): n is a, c, g, or t
  misc_feature (1185)..(1185): n is a, c, g, or t
  misc_feature (1189)..(1189): n is a, c, g, or t
  misc_feature (1191)..(1191): n is a, c, g, or t
  misc_feature (1193)..(1194): n is a, c, g, or t
  misc_feature (1196)..(1196): n is a, c, g, or t
  misc_feature (1205)..(1206): n is a, c, g, or t
  misc_feature (1210)..(1210): n is a, c, g, or t
  misc_feature (1213)..(1213): n is a, c, g, or t
  misc_feature (1216)..(1218): n is a, c, g, or t
  misc_feature (1220)..(1220): n is a, c, g, or t
  misc_feature (1223)..(1226): n is a, c, g, or t
  misc_feature (1229)..(1229): n is a, c, g, or t
  misc_feature (1231)..(1231): n is a, c, g, or t
  misc_feature (1234)..(1234): n is a, c, g, or t
  misc_feature (1236)..(1236): n is a, c, g, or t
  misc_feature (1238)..(1238): n is a, c, g, or t
  misc_feature (1242)..(1242): n is a, c, g, or t
  misc_feature (1247)..(1247): n is a, c, g, or t
  misc_feature (1250)..(1250): n is a, c, g, or t
  misc_feature (1252)..(1252): n is a, c, g, or t
  misc_feature (1255)..(1256): n is a, c, g, or t
  misc_feature (1261)..(1261): n is a, c, g, or t
  misc_feature (1265)..(1265): n is a, c, g, or t
  misc_feature (1268)..(1268): n is a, c, g, or t
  misc_feature (1270)..(1270): n is a, c, g, or t
  misc_feature (1274)..(1274): n is a, c, g, or t
  misc_feature (1283)..(1283): n is a, c, g, or t
  misc_feature (1287)..(1287): n is a, c, g, or t
  misc_feature (1289)..(1290): n is a, c, g, or t
  misc_feature (1293)..(1293): n is a, c, g, or t
  misc_feature (1295)..(1298): n is a, c, g, or t
  misc_feature (1300)..(1304): n is a, c, g, or t
  misc_feature (1311)..(1312): n is a, c, g, or t
  misc_feature (1317)..(1317): n is a, c, g, or t
  misc_feature (1320)..(1321): n is a, c, g, or t
  misc_feature (1329)..(1329): n is a, c, g, or t
  misc_feature (1335)..(1335): n is a, c, g, or t
  misc_feature (1338)..(1338): n is a, c, g, or t
  misc_feature (1346)..(1347): n is a, c, g, or t
  misc_feature (1349)..(1349): n is a, c, g, or t
  misc_feature (1351)..(1351): n is a, c, g, or t
  misc_feature (1353)..(1353): n is a, c, g, or t
  misc_feature (1356)..(1356): n is a, c, g, or t
  misc_feature (1361)..(1361): n is a, c, g, or t
  misc_feature (1364)..(1364): n is a, c, g, or t
  misc_feature (1369)..(1370): n is a, c, g, or t
  misc_feature (1376)..(1376): n is a, c, g, or t
  misc_feature (1378)..(1378): n is a, c, g, or t
  misc_feature (1381)..(1381): n is a, c, g, or t
  misc_feature (1384)..(1384): n is a, c, g, or t
  misc_feature (1389)..(1389): n is a, c, g, or t
  misc_feature (1392)..(1392): n is a, c, g, or t
  misc_feature (1395)..(1396): n is a, c, g, or t
  misc_feature (1401)..(1401): n is a, c, g, or t
  misc_feature (1405)..(1405): n is a, c, g, or t
  misc_feature (1414)..(1415): n is a, c, g, or t
  misc_feature (1417)..(1417): n is a, c, g, or t
  misc_feature (1420)..(1420): n is a, c, g, or t
  misc_feature (1422)..(1422): n is a, c, g, or t
  misc_feature (1426)..(1426): n is a, c, g, or t
  misc_feature (1428)..(1429): n is a, c, g, or t
  misc_feature (1432)..(1432): n is a, c, g, or t
  misc_feature (1434)..(1434): n is a, c, g, or t
  misc_feature (1436)..(1436): n is a, c, g, or t
  misc_feature (1440)..(1440): n is a, c, g, or t
  misc_feature (1442)..(1443): n is a, c, g, or t
  misc_feature (1450)..(1451): n is a, c, g, or t
  misc_feature (1454)..(1454): n is a, c, g, or t
  misc_feature (1459)..(1459): n is a, c, g, or t
  misc_feature (1467)..(1468): n is a, c, g, or t
  misc_feature (1472)..(1472): n is a, c, g, or t
  misc_feature (1475)..(1475): n is a, c, g, or t
  misc_feature (1484)..(1484): n is a, c, g, or t
  misc_feature (1486)..(1488): n is a, c, g, or t
  misc_feature (1491)..(1492): n is a, c, g, or t
  misc_feature (1503)..(1503): n is a, c, g, or t
  misc_feature (1511)..(1511): n is a, c, g, or t
  misc_feature (1513)..(1513): n is a, c, g, or t
  misc_feature (1515)..(1515): n is a, c, g, or t
  misc_feature (1518)..(1519): n is a, c, g, or t
  misc_feature (1522)..(1522): n is a, c, g, or t
  misc_feature (1524)..(1525): n is a, c, g, or t
  misc_feature (1529)..(1529): n is a, c, g, or t
  misc_feature (1531)..(1531): n is a, c, g, or t
  misc_feature (1534)..(1534): n is a, c, g, or t
  misc_feature (1544)..(1544): n is a, c, g, or t
  misc_feature (1549)..(1549): n is a, c, g, or t
  misc_feature (1552)..(1554): n is a, c, g, or t
  misc_feature (1558)..(1558): n is a, c, g, or t
  misc_feature (1560)..(1560): n is a, c, g, or t
  misc_feature (1562)..(1563): n is a, c, g, or t
  misc_feature (1569)..(1569): n is a, c, g, or t
  misc_feature (1578)..(1579): n is a, c, g, or t
  misc_feature (1581)..(1581): n is a, c, g, or t
  misc_feature (1583)..(1583): n is a, c, g, or t
  misc_feature (1586)..(1586): n is a, c, g, or t
  misc_feature (1588)..(1590): n is a, c, g, or t
  misc_feature (1592)..(1592): n is a, c, g, or t
  misc_feature (1595)..(1595): n is a, c, g, or t
  misc_feature (1598)..(1598): n is a, c, g, or t
  misc_feature (1603)..(1605): n is a, c, g, or t
  misc_feature (1607)..(1607): n is a, c, g, or t
  misc_feature (1611)..(1611): n is a, c, g, or t
  misc_feature (1613)..(1614): n is a, c, g, or t
  misc_feature (1621)..(1621): n is a, c, g, or t
  misc_feature (1633)..(1635): n is a, c, g, or t
  misc_feature (1640)..(1640): n is a, c, g, or t
  misc_feature (1643)..(1643): n is a, c, g, or t
  misc_feature (1645)..(1645): n is a, c, g, or t
  misc_feature (1647)..(1647): n is a, c, g, or t
  misc_feature (1650)..(1650): n is a, c, g, or t
  misc_feature (1654)..(1654): n is a, c, g, or t
  misc_feature (1667)..(1667): n is a, c, g, or t
  misc_feature (1669)..(1669): n is a, c, g, or t
  misc_feature (1678)..(1679): n is a, c, g, or t
  misc_feature (1681)..(1683): n is a, c, g, or t
  misc_feature (1689)..(1689): n is a, c, g, or t
  misc_feature (1696)..(1696): n is a, c, g, or t
  misc_feature (1703)..(1703): n is a, c, g, or t
  misc_feature (1705)..(1705): n is a, c, g, or t
  misc_feature (1707)..(1707): n is a, c, g, or t
  misc_feature (1709)..(1709): n is a, c, g, or t
gnaannanaagaattacncnaaggcgtnggatgnccctgccccgctcccactntaggagggaatccnnctttttgtgtggggaggnttnnnaaaatagttgcgcacccccgccgcttccgnggnnnggtggngggtataccntcggangttgcgnagatnctgtaataantcnnccccgtccctngnntggcngnnngccccggaggcaangcngcccnanccacccaaaancnccngggcnccnnngaacncccngctntgatcanngnanggctnagncgnnngccnnnnanctnanananctngaatnaacntncanaactggnncanccnnactcncgctcttgncncnngaancaancantcttcnanttaanaactanctnnnttangnnngnntccttngannaacccctagnnnannanatatnncnatcncttccnaanncntnnatgtgannccctntnntnacgtagcggagtntnnnncnnntntcntnnccnnggnctnntcatcnanncnnngnnnccannnaactaanncnatcnancccttactcgnaanntnagatnactccangcnnncnnngtannannncccnntccaaanccnntnccancnnggannannccaaanngnnaganntannnnccnannnacagnnnanttanntccacnnnnnctccnaannagnancnntntatncncnanctacaacntcnangccnatnattcctnngnatttnaatcnaaacctnngtctccntncaannnnctntttnnncananntgnncnccntcacntgnttgtnnctctccatcnncacctntntnctatnnnnntnncnanccnncnctnnannttnnncttttnnttnacnntnnnatcancncangananaannnnannntcngnccnncatanatagnccnctaaanannntnnattntaagcnctcantnctcnttnanctannncntnnntcnnnatcntantcnncnnacnntnttctnntnacnctnnttnnnncnnnnnnnccnancgtnatannataaannnttntncacncctcnnacnattncaantnttagncgtnnttcnaaaannnaacnntcctncgaaantcaatnnctatnanccncantcnaagnatanntcnacnttnattntntctnancnnancatntnanncnatggttcannaatnacnttnnnanatnnnnatnanacncnanttanattancantnatnntcacncctntcncntcanaaacgtctncttncnnaantnnnntnnnnncacacannccttntcnnctcacacntctagnccnatctccannantnanacnacctnatnacacnnatctananaanaantcttnatnttnnttttntaantacaaaaanncnatnantacncnnatnantncctngnncatttcnntcnaagtncctcaacnntacnctnaaatacctnannnctnntcagttactcnattcatcntntnacnnacntnnctancnatnttcctcaatngaatnacnnnaacncntnncagtantcatcctannananccncnnnanctnatnttccnnntncttntnnttctgcnatttaaaatcannncttanttntngnttntctntctctcttcatantntaatctctnntnnncatccntcatttncacttantncncnatc

SEQ ID NO: 982 - DNA, 1377 bp, Homo Sapiens
  misc_feature (4)..(11): n is a, c, g, or t
  misc_feature (13)..(13): n is a, c, g, or t
  misc_feature (104)..(104): n is a, c, g, or t
  misc_feature (232)..(232): n is a, c, g, or t
  misc_feature (382)..(382): n is a, c, g, or t
  misc_feature (519)..(519): n is a, c, g, or t
  misc_feature (531)..(531): n is a, c, g, or t
  misc_feature (565)..(565): n is a, c, g, or t
  misc_feature (580)..(580): n is a, c, g, or t
  misc_feature (585)..(585): n is a, c, g, or t
  misc_feature (602)..(602): n is a, c, g, or t
  misc_feature (606)..(606): n is a, c, g, or t
  misc_feature (612)..(612): n is a, c, g, or t
  misc_feature (616)..(616): n is a, c, g, or t
  misc_feature (618)..(618): n is a, c, g, or t
  misc_feature (623)..(623): n is a, c, g, or t
  misc_feature (625)..(625): n is a, c, g, or t
  misc_feature (652)..(652): n is a, c, g, or t
  misc_feature (670)..(670): n is a, c, g, or t
  misc_feature (679)..(679): n is a, c, g, or t
  misc_feature (687)..(687): n is a, c, g, or t
  misc_feature (697)..(697): n is a, c, g, or t
  misc_feature (705)..(705): n is a, c, g, or t
  misc_feature (719)..(719): n is a, c, g, or t
  misc_feature (728)..(728): n is a, c, g, or t
  misc_feature (732)..(732): n is a, c, g, or t
  misc_feature (735)..(735): n is a, c, g, or t
  misc_feature (757)..(757): n is a, c, g, or t
  misc_feature (781)..(781): n is a, c, g, or t
  misc_feature (788)..(788): n is a, c, g, or t
  misc_feature (790)..(790): n is a, c, g, or t
  misc_feature (795)..(795): n is a, c, g, or t
  misc_feature (800)..(801): n is a, c, g, or t
  misc_feature (807)..(808): n is a, c, g, or t
  misc_feature (810)..(810): n is a, c, g, or t
  misc_feature (817)..(817): n is a, c, g, or t
  misc_feature (822)..(822): n is a, c, g, or t
  misc_feature (835)..(836): n is a, c, g, or t
  misc_feature (848)..(848): n is a, c, g, or t
  misc_feature (863)..(863): n is a, c, g, or t
  misc_feature (866)..(866): n is a, c, g, or t
  misc_feature (875)..(875): n is a, c, g, or t
  misc_feature (877)..(877): n is a, c, g, or t
  misc_feature (892)..(892): n is a, c, g, or t
  misc_feature (895)..(895): n is a, c, g, or t
  misc_feature (900)..(900): n is a, c, g, or t
  misc_feature (916)..(916): n is a, c, g, or t
  misc_feature (947)..(948): n is a, c, g, or t
  misc_feature (957)..(957): n is a, c, g, or t
  misc_feature (959)..(959): n is a, c, g, or t
  misc_feature (963)..(963): n is a, c, g, or t
  misc_feature (968)..(968): n is a, c, g, or t
  misc_feature (982)..(982): n is a, c, g, or t
  misc_feature (985)..(985): n is a, c, g, or t
  misc_feature (1003)..(1003): n is a, c, g, or t
  misc_feature (1005)..(1005): n is a, c, g, or t
  misc_feature (1009)..(1010): n is a, c, g, or t
  misc_feature (1012)..(1012): n is a, c, g, or t
  misc_feature (1014)..(1014): n is a, c, g, or t
  misc_feature (1035)..(1035): n is a, c, g, or t
  misc_feature (1042)..(1042): n is a, c, g, or t
  misc_feature (1044)..(1044): n is a, c, g, or t
  misc_feature (1048)..(1048): n is a, c, g, or t
  misc_feature (1054)..(1054): n is a, c, g, or t
  misc_feature (1064)..(1064): n is a, c, g, or t
  misc_feature (1066)..(1066): n is a, c, g, or t
  misc_feature (1068)..(1068): n is a, c, g, or t
  misc_feature (1083)..(1084): n is a, c, g, or t
  misc_feature (1090)..(1090): n is a, c, g, or t
  misc_feature (1100)..(1101): n is a, c, g, or t
  misc_feature (1103)..(1103): n is a, c, g, or t
  misc_feature (1109)..(1109): n is a, c, g, or t
  misc_feature (1112)..(1112): n is a, c, g, or t
  misc_feature (1114)..(1114): n is a, c, g, or t
  misc_feature (1117)..(1117): n is a, c, g, or t
  misc_feature (1123)..(1123): n is a, c, g, or t
  misc_feature (1127)..(1127): n is a, c, g, or t
  misc_feature (1136)..(1139): n is a, c, g, or t
  misc_feature (1142)..(1142): n is a, c, g, or t
  misc_feature (1147)..(1147): n is a, c, g, or t
  misc_feature (1152)..(1152): n is a, c, g, or t
  misc_feature (1154)..(1154): n is a, c, g, or t
  misc_feature (1156)..(1158): n is a, c, g, or t
  misc_feature (1166)..(1166): n is a, c, g, or t
  misc_feature (1179)..(1179): n is a, c, g, or t
  misc_feature (1195)..(1195): n is a, c, g, or t
  misc_feature (1199)..(1200): n is a, c, g, or t
  misc_feature (1205)..(1205): n is a, c, g, or t
  misc_feature (1209)..(1212): n is a, c, g, or t
  misc_feature (1214)..(1214): n is a, c, g, or t
  misc_feature (1219)..(1219): n is a, c, g, or t
  misc_feature (1222)..(1222): n is a, c, g, or t
  misc_feature (1227)..(1227): n is a, c, g, or t
  misc_feature (1229)..(1229): n is a, c, g, or t
  misc_feature (1242)..(1243): n is a, c, g, or t
  misc_feature (1249)..(1249): n is a, c, g, or t
  misc_feature (1265)..(1265): n is a, c, g, or t
  misc_feature (1270)..(1270): n is a, c, g, or t
  misc_feature (1274)..(1275): n is a, c, g, or t
  misc_feature (1285)..(1285): n is a, c, g, or t
  misc_feature (1288)..(1288): n is a, c, g, or t
  misc_feature (1296)..(1296): n is a, c, g, or t
  misc_feature (1316)..(1316): n is a, c, g, or t
  misc_feature (1318)..(1318): n is a, c, g, or t
  misc_feature (1320)..(1321): n is a, c, g, or t
  misc_feature (1329)..(1329): n is a, c, g, or t
  misc_feature (1331)..(1336): n is a, c, g, or t
  misc_feature (1339)..(1343): n is a, c, g, or t
  misc_feature (1345)..(1346): n is a, c, g, or t
  misc_feature (1348)..(1348): n is a, c, g, or t
  misc_feature (1352)..(1352): n is a, c, g, or t
  misc_feature (1356)..(1358): n is a, c, g, or t
  misc_feature (1360)..(1360): n is a, c, g, or t
  misc_feature (1362)..(1365): n is a, c, g, or t
  misc_feature (1369)..(1369): n is a, c, g, or t
  misc_feature (1371)..(1372): n is a, c, g, or t
gaannnnnnnnantagagaaattactatgagaggatcgcatcaccatcaccatcacggatcctatttaggtgacactatagaatcgtcgacccacgcgtccggncggtccccgggcccactggcggctcctcgggtcgcttcctcagccccgagcagcacgcgtgcagctggcagctcctgctgcccgccccggaggccgcagcgggcagcgagctggcgctgcgctgccanagcccggacggggcgcgccaccagtgcgcctaccgcgggcatccggagcgctgcgcagcctacgccgctcgccgcgcgcacttctggaagcaggtgctgggagggctgcgcaagaagcggaggccctgtcacgaccccgcgccgctccangcccgcttgtgcgcgggcaagaagggccacggcgccgaactgcggctagtgccccgcgcgtccccgcccgcacgccccaccgtcgcgggattcgcgggggagtccaagccccgggcccggaaccgggggcggacccnggagcgtgcgtncggcccagccgctgggaccccgcctccccaaaancgcaccgcccaaaanaaaanccctcagagaagaagancaancgtggncaanangaaangnggccttggtcccccaacgaagaacganccatggggaccgggcccnaccccgacnggctggangggaacgcgnaactcacngaaaactacttgcnctgaaaaantggncantccctctgcaacttcttttttnaattttcttggaaaagattgaaanttgtccntnccggncttanngaaggnntntatgggngaaangccttggggaaanngaaaaactaaangggcggttttaaaanccngggggggtnanttttaaaaaaaaaanttntgggnaaaaattccaggtttntctaaatggggggttgggggcaaaggttaannggttaaaantntttngtaanaaaaaattttaaanggnttaatgaaaaaatctttntnggannancnaaaaaaattaaaaaatttttnaaaaatntntcanttcttnattaaaaaanangnaaaaaaaaaattttnnaaaaanaaaaaaaggnntnattttnaantnttnaaaaantttnaaaatttgnnnnaanaaaanttaantncnnnaaaaaaanttttaaaaaaaanggggaaaaaaaaaaanaaannaaaanaatnnnnantcccnttntgggnangggggaaacaaanntttaantttttaaaattttttntaaanatannacctttaaanaanttccatcnttaaaaaaaaaaaaaaaaananannaaaaatanannnnnnaannnnnannanatanaatnnnanannnnaatnannctctc

SEQ ID NO: 983 - DNA, 1446 bp, Homo Sapiens
  misc_feature (594)..(594): n is a, c, g, or t
  misc_feature (657)..(657): n is a, c, g, or t
  misc_feature (667)..(667): n is a, c, g, or t
  misc_feature (720)..(720): n is a, c, g, or t
  misc_feature (727)..(727): n is a, c, g, or t
  misc_feature (751)..(751): n is a, c, g, or t
  misc_feature (755)..(755): n is a, c, g, or t
  misc_feature (780)..(780): n is a, c, g, or t
  misc_feature (784)..(784): n is a, c, g, or t
  misc_feature (791)..(791): n is a, c, g, or t
  misc_feature (818)..(818): n is a, c, g, or t
  misc_feature (828)..(828): n is a, c, g, or t
  misc_feature (830)..(830): n is a, c, g, or t
  misc_feature (856)..(856): n is a, c, g, or t
  misc_feature (863)..(863): n is a, c, g, or t
  misc_feature (872)..(872): n is a, c, g, or t
  misc_feature (876)..(876): n is a, c, g, or t
  misc_feature (896)..(896): n is a, c, g, or t
  misc_feature (900)..(900): n is a, c, g, or t
  misc_feature (904)..(904): n is a, c, g, or t
  misc_feature (907)..(907): n is a, c, g, or t
  misc_feature (912)..(912): n is a, c, g, or t
  misc_feature (919)..(919): n is a, c, g, or t
  misc_feature (923)..(923): n is a, c, g, or t
  misc_feature (934)..(934): n is a, c, g, or t
  misc_feature (943)..(943): n is a, c, g, or t
  misc_feature (946)..(946): n is a, c, g, or t
  misc_feature (948)..(948): n is a, c, g, or t
  misc_feature (965)..(965): n is a, c, g, or t
  misc_feature (973)..(973): n is a, c, g, or t
  misc_feature (975)..(975): n is a, c, g, or t
  misc_feature (991)..(991): n is a, c, g, or t
  misc_feature (995)..(995): n is a, c, g, or t
  misc_feature (1002)..(1002): n is a, c, g, or t
  misc_feature (1011)..(1011): n is a, c, g, or t
  misc_feature (1014)..(1014): n is a, c, g, or t
  misc_feature (1016)..(1016): n is a, c, g, or t
  misc_feature (1021)..(1022): n is a, c, g, or t
  misc_feature (1024)..(1024): n is a, c, g, or t
  misc_feature (1026)..(1026): n is a, c, g, or t
  misc_feature (1040)..(1041): n is a, c, g, or t
  misc_feature (1052)..(1052): n is a, c, g, or t
  misc_feature (1057)..(1058): n is a, c, g, or t
  misc_feature (1075)..(1075): n is a, c, g, or t
  misc_feature (1079)..(1080): n is a, c, g, or t
  misc_feature (1082)..(1083): n is a, c, g, or t
  misc_feature (1085)..(1085): n is a, c, g, or t
  misc_feature (1090)..(1090): n is a, c, g, or t
  misc_feature (1092)..(1092): n is a, c, g, or t
  misc_feature (1095)..(1095): n is a, c, g, or t
  misc_feature (1099)..(1099): n is a, c, g, or t
  misc_feature (1104)..(1104): n is a, c, g, or t
  misc_feature (1108)..(1108): n is a, c, g, or t
  misc_feature (1110)..(1110): n is a, c, g, or t
  misc_feature (1112)..(1113): n is a, c, g, or t
  misc_feature (1117)..(1117): n is a, c, g, or t
  misc_feature (1124)..(1124): n is a, c, g, or t
  misc_feature (1129)..(1129): n is a, c, g, or t
  misc_feature (1131)..(1134): n is a, c, g, or t
  misc_feature (1137)..(1137): n is a, c, g, or t
  misc_feature (1139)..(1141): n is a, c, g, or t
  misc_feature (1147)..(1147): n is a, c, g, or t
  misc_feature (1151)..(1151): n is a, c, g, or t
  misc_feature (1156)..(1156): n is a, c, g, or t
  misc_feature (1166)..(1167): n is a, c, g, or t
  misc_feature (1180)..(1181): n is a, c, g, or t
  misc_feature (1191)..(1191): n is a, c, g, or t
  misc_feature (1195)..(1195): n is a, c, g, or t
  misc_feature (1198)..(1198): n is a, c, g, or t
  misc_feature (1200)..(1200): n is a, c, g, or t
  misc_feature (1204)..(1204): n is a, c, g, or t
  misc_feature (1211)..(1211): n is a, c, g, or t
  misc_feature (1214)..(1214): n is a, c, g, or t
  misc_feature (1216)..(1216): n is a, c, g, or t
  misc_feature (1219)..(1219): n is a, c, g, or t
  misc_feature (1228)..(1228): n is a, c, g, or t
  misc_feature (1234)..(1234): n is a, c, g, or t
  misc_feature (1239)..(1239): n is a, c, g, or t
  misc_feature (1258)..(1258): n is a, c, g, or t
  misc_feature (1269)..(1269): n is a, c, g, or t
  misc_feature (1274)..(1274): n is a, c, g, or t
  misc_feature (1280)..(1280): n is a, c, g, or t
  misc_feature (1286)..(1286): n is a, c, g, or t
  misc_feature (1289)..(1289): n is a, c, g, or t
  misc_feature (1293)..(1294): n is a, c, g, or t
  misc_feature (1297)..(1297): n is a, c, g, or t
  misc_feature (1301)..(1301): n is a, c, g, or t
  misc_feature (1303)..(1303): n is a, c, g, or t
  misc_feature (1306)..(1306): n is a, c, g, or t
  misc_feature (1308)..(1308): n is a, c, g, or t
  misc_feature (1311)..(1311): n is a, c, g, or t
  misc_feature (1315)..(1315): n is a, c, g, or t
  misc_feature (1319)..(1321): n is a, c, g, or t
  misc_feature (1332)..(1335): n is a, c, g, or t
  misc_feature (1337)..(1339): n is a, c, g, or t
  misc_feature (1342)..(1344): n is a, c, g, or t
  misc_feature (1351)..(1351): n is a, c, g, or t
  misc_feature (1354)..(1354): n is a, c, g, or t
  misc_feature (1357)..(1358): n is a, c, g, or t
  misc_feature (1361)..(1361): n is a, c, g, or t
  misc_feature (1363)..(1366): n is a, c, g, or t
  misc_feature (1368)..(1368): n is a, c, g, or t
  misc_feature (1370)..(1372): n is a, c, g, or t
  misc_feature (1379)..(1379): n is a, c, g, or t
  misc_feature (1388)..(1388): n is a, c, g, or t
  misc_feature (1392)..(1394): n is a, c, g, or t
  misc_feature (1399)..(1399): n is a, c, g, or t
  misc_feature (1402)..(1404): n is a, c, g, or t
  misc_feature (1410)..(1410): n is a, c, g, or t
  misc_feature (1412)..(1412): n is a, c, g, or t
  misc_feature (1416)..(1416): n is a, c, g, or t
  misc_feature (1418)..(1420): n is a, c, g, or t
  misc_feature (1424)..(1424): n is a, c, g, or t
  misc_feature (1427)..(1428): n is a, c, g, or t
  misc_feature (1432)..(1433): n is a, c, g, or t
  misc_feature (1438)..(1438): n is a, c, g, or t
  misc_feature (1446)..(1446): n is a, c, g, or t
gattagagagattactatgagaggatcgcatcaccatcaccatcacggatcctatttaggtgacactatagaatcgtcgacccacgcgtccgggtatttctcggcctgcgagaagtgtgtgctggcccaggtgtgcaaggcctggcggcgcgtgctgtaccagcccaagttctgggcaggcctcacgccggtgctgcatgccaaggagctctacaacgtgctgcctggtggcgagaaggagttcgtgaacctgcagggttttgctgccagaggcttcgagggcttctgcctggtgggcgtctccgacctggacatctgtgagttcattgacaactatgcgctctccaagaagggtgtcaaagccatgagcctcaagcgctccaccatcacggacgcaggcctcgaggttatgcttgaacagatgcagggcgtggtgcgtctggagctgtcgggctgcaacgacttcaccgaggccgggctgtggtccagcctgagcgcgcgcatcacctcgctgagcgtgagtgactgcatcaacgtggccgacgacgccatcgcggccatctcgcagctgctgcccaacctggcggagctgancctgcaggcctaccacgtgacggacacggcgctggcctacttcacggcgcgccagggccacancacgcacacnctgcgcctgctctcctgctgggagatcaccaaccacggcgtggtcaaacgtgntgcacancctgcccaacctcaccgcgctcancctntcgggctgctccaaggtcaccgacnacgncgtgganctcgtggccaagaaaccttgcgcaaanctgccgcaancnttgaacctctcgtggtgcccacgcantcacccnacatgggcnctgnaatacctggccctgcaaacntgcncccnccnaaaangaaaccncgtnctcaaaaaggngtgtaaccnatncngaaaactggcctcaacnatttgacnanaagtccttccccccgnaagnctcttanctgacaatnggngntcccnngntncaaaaaactccggnntgaaaacaccntcctnncccctggggaaatttgncccnncnntnttttngnaantttnacccntttntnannaacnacccgtntattntnnnnccntnnngaaatnacanaaacntggaaaattnnaaacttaaacaanntcccccgggncacnccncnaatnacttaanaantnttnaaaaccctncccctnatacntcataaataaaataccaanacccccacccnttaanggaaanaaaatnaanatanngcngaancntanancanatantcannnatccctctctnnnnannnaannnaccccanatnaannaanannnnanannnaaaaacnctaaaattnactnnnaccantannnccaaananatanannnacanaanntacnntaatnattataan

SEQ ID NO: 984 - DNA, 1320 bp, Homo Sapiens
  misc_feature (11)..(11): n is a, c, g, or t
  misc_feature (829)..(829): n is a, c, g, or t
  misc_feature (903)..(903): n is a, c, g, or t
  misc_feature (947)..(947): n is a, c, g, or t
  misc_feature (952)..(952): n is a, c, g, or t
  misc_feature (970)..(970): n is a, c, g, or t
  misc_feature (983)..(983): n is a, c, g, or t
  misc_feature (1007)..(1007): n is a, c, g, or t
  misc_feature (1033)..(1033): n is a, c, g, or t
  misc_feature (1041)..(1041): n is a, c, g, or t
  misc_feature (1054)..(1054): n is a, c, g, or t
  misc_feature (1062)..(1062): n is a, c, g, or t
  misc_feature (1068)..(1068): n is a, c, g, or t
  misc_feature (1071)..(1071): n is a, c, g, or t
  misc_feature (1078)..(1078): n is a, c, g, or t
  misc_feature (1095)..(1095): n is a, c, g, or t
  misc_feature (1099)..(1099): n is a, c, g, or t
  misc_feature (1106)..(1106): n is a, c, g, or t
  misc_feature (1108)..(1108): n is a, c, g, or t
  misc_feature (1118)..(1118): n is a, c, g, or t
  misc_feature (1122)..(1122): n is a, c, g, or t
  misc_feature (1124)..(1124): n is a, c, g, or t
  misc_feature (1134)..(1134): n is a, c, g, or t
  misc_feature (1139)..(1139): n is a, c, g, or t
  misc_feature (1142)..(1142): n is a, c, g, or t
  misc_feature (1155)..(1155): n is a, c, g, or t
  misc_feature (1159)..(1159): n is a, c, g, or t
  misc_feature (1163)..(1163): n is a, c, g, or t
  misc_feature (1169)..(1169): n is a, c, g, or t
  misc_feature (1173)..(1174): n is a, c, g, or t
  misc_feature (1179)..(1182): n is a, c, g, or t
  misc_feature (1187)..(1187): n is a, c, g, or t
  misc_feature (1193)..(1194): n is a, c, g, or t
  misc_feature (1202)..(1202): n is a, c, g, or t
  misc_feature (1209)..(1209): n is a, c, g, or t
  misc_feature (1211)..(1211): n is a, c, g, or t
  misc_feature (1213)..(1213): n is a, c, g, or t
  misc_feature (1215)..(1217): n is a, c, g, or t
  misc_feature (1220)..(1221): n is a, c, g, or t
  misc_feature (1223)..(1223): n is a, c, g, or t
  misc_feature (1226)..(1226): n is a, c, g, or t
  misc_feature (1230)..(1234): n is a, c, g, or t
  misc_feature (1243)..(1245): n is a, c, g, or t
  misc_feature (1247)..(1247): n is a, c, g, or t
  misc_feature (1249)..(1250): n is a, c, g, or t
  misc_feature (1252)..(1252): n is a, c, g, or t
  misc_feature (1254)..(1254): n is a, c, g, or t
  misc_feature (1260)..(1261): n is a, c, g, or t
  misc_feature (1269)..(1270): n is a, c, g, or t
  misc_feature (1275)..(1276): n is a, c, g, or t
  misc_feature (1278)..(1278): n is a, c, g, or t
  misc_feature (1281)..(1281): n is a, c, g, or t
  misc_feature (1284)..(1284): n is a, c, g, or t
  misc_feature (1287)..(1288): n is a, c, g, or t
  misc_feature (1292)..(1292): n is a, c, g, or t
  misc_feature (1296)..(1302): n is a, c, g, or t
  misc_feature (1306)..(1306): n is a, c, g, or t
  misc_feature (1309)..(1310): n is a, c, g, or t
  misc_feature (1313)..(1313): n is a, c, g, or t
  misc_feature (1318)..(1318): n is a, c, g, or t
  misc_feature (1320)..(1320): n is a, c, g, or t
agaaaattacntggagaggatcgcatcaccatcaccatcacgggatcctatttaggtgacactatagaatcgtcgacccacgcgtccggggcgtccgaggagagccaggccatgcaggcccacgtgtctattatcctcccagtccacaacgctgaaccgtggctggacgaatgtttgaggtctgttttgcaacaggactttgaaggtaccatggagctgtctgttttcaatgatgccagtaaggacaagtctggggctatcattgaaaaatggagagtgaagctggaagattctggtgtccatgtgatcattggggggcacgattctccctctcctagaggcgtcggatacgctaaaaatcaagcagttgcccagagctcagggtcttacctttgctttttggattcggatgacgtcatgatgccccagcgggtgaggctgcaacacgaggctgccgttcagcacccgtcgagcatcattggttgcagagtgaggagagatccccctaactccaccgaacgatacacacgttggatcaaccagctgacgccggagcagctcctaacccaggttttcacctcaaatggccccacggtgatcatgcccacctggttctgctcgcgagcgtggttctcccacgtgggcccctttaacgagggaggtcagggcgtcccggaggacctgctgttcttctacgagcacctcaggaagggcggcggcgtcatccgcgtggaccagagtctcctgctgtatcgccaccacccacaggcggccacgcactgcgtcctcgagacgaccatctggacccaccgcgtccgcttcctggaanaacaggccctgccccgctgggcggccttcaccatctggaacgctgggcaagcaggggcgccggctgtaccgcancttgactgccggcagccagcgcaaggggtggcattctgtgacgnggacnaaaacaagatcaggaaangcttctattgccnccaaggactctcaggaaaaaaccnaagcccccaaatccccatccctgcantttcgaancccgcccgggccnccctttcntcattntgngggaaanctgccctctcccccttnttanccaaagnanccaaaacccnttgnanggggggaaanaaggnccnccccccaaccccngggncctnggaagnaagnnccccnnnnggggncccccnnaaaacccnggaaaancngnannnaanntnaantttnnnnnccctgaaannnancnncnangggggnncccttttnnaaaanncnggnggnccnngccntttnnnnnnngggnccnnaanttctntn

SEQ ID NO: 985 - DNA, 1200 bp, Homo Sapiens
  misc_feature (1)..(1): n is a, c, g, or t
  misc_feature (364)..(365): n is a, c, g, or t
  misc_feature (422)..(422): n is a, c, g, or t
  misc_feature (502)..(502): n is a, c, g, or t
  misc_feature (564)..(564): n is a, c, g, or t
  misc_feature (587)..(587): n is a, c, g, or t
  misc_feature (618)..(618): n is a, c, g, or t
  misc_feature (627)..(627): n is a, c, g, or t
  misc_feature (639)..(639): n is a, c, g, or t
  misc_feature (666)..(666): n is a, c, g, or t
  misc_feature (695)..(695): n is a, c, g, or t
  misc_feature (718)..(718): n is a, c, g, or t
  misc_feature (730)..(730): n is a, c, g, or t
  misc_feature (743)..(743): n is a, c, g, or t
  misc_feature (745)..(745): n is a, c, g, or t
  misc_feature (752)..(752): n is a, c, g, or t
  misc_feature (768)..(768): n is a, c, g, or t
  misc_feature (775)..(775): n is a, c, g, or t
  misc_feature (788)..(788): n is a, c, g, or t
  misc_feature (792)..(792): n is a, c, g, or t
  misc_feature (795)..(795): n is a, c, g, or t
  misc_feature (797)..(797): n is a, c, g, or t
  misc_feature (799)..(799): n is a, c, g, or t
  misc_feature (803)..(803): n is a, c, g, or t
  misc_feature (805)..(805): n is a, c, g, or t
  misc_feature (810)..(811): n is a, c, g, or t
  misc_feature (816)..(817): n is a, c, g, or t
  misc_feature (824)..(824): n is a, c, g, or t
  misc_feature (828)..(828): n is a, c, g, or t
  misc_feature (838)..(838): n is a, c, g, or t
  misc_feature (841)..(841): n is a, c, g, or t
  misc_feature (844)..(844): n is a, c, g, or t
  misc_feature (852)..(852): n is a, c, g, or t
  misc_feature (861)..(861): n is a, c, g, or t
  misc_feature (878)..(879): n is a, c, g, or t
  misc_feature (883)..(884): n is a, c, g, or t
  misc_feature (889)..(890): n is a, c, g, or t
  misc_feature (895)..(895): n is a, c, g, or t
  misc_feature (897)..(897): n is a, c, g, or t
  misc_feature (899)..(899): n is a, c, g, or t
  misc_feature (902)..(902): n is a, c, g, or t
  misc_feature (904)..(904): n is a, c, g, or t
  misc_feature (906)..(906): n is a, c, g, or t
  misc_feature (914)..(914): n is a, c, g, or t
  misc_feature (921)..(921): n is a, c, g, or t
  misc_feature (924)..(924): n is a, c, g, or t
  misc_feature (935)..(936): n is a, c, g, or t
  misc_feature (940)..(940): n is a, c, g, or t
  misc_feature (948)..(948): n is a, c, g, or t
  misc_feature (957)..(958): n is a, c, g, or t
  misc_feature (968)..(968): n is a, c, g, or t
  misc_feature (973)..(973): n is a, c, g, or t
  misc_feature (975)..(975): n is a, c, g, or t
  misc_feature (980)..(980): n is a, c, g, or t
  misc_feature (986)..(987): n is a, c, g, or t
  misc_feature (996)..(996): n is a, c, g, or t
  misc_feature (999)..(1000): n is a, c, g, or t
  misc_feature (1006)..(1006): n is a, c, g, or t
  misc_feature (1018)..(1018): n is a, c, g, or t
  misc_feature (1031)..(1031): n is a, c, g, or t
  misc_feature (1037)..(1037): n is a, c, g, or t
  misc_feature (1041)..(1042): n is a, c, g, or t
  misc_feature (1045)..(1045): n is a, c, g, or t
  misc_feature (1053)..(1053): n is a, c, g, or t
  misc_feature (1063)..(1065): n is a, c, g, or t
  misc_feature (1078)..(1078): n is a, c, g, or t
  misc_feature (1091)..(1091): n is a, c, g, or t
  misc_feature (1094)..(1094): n is a, c, g, or t
  misc_feature (1102)..(1102): n is a, c, g, or t
  misc_feature (1112)..(1112): n is a, c, g, or t
  misc_feature (1115)..(1116): n is a, c, g, or t
  misc_feature (1123)..(1123): n is a, c, g, or t
  misc_feature (1143)..(1143): n is a, c, g, or t
  misc_feature (1145)..(1145): n is a, c, g, or t
  misc_feature (1152)..(1152): n is a, c, g, or t
  misc_feature (1154)..(1154): n is a, c, g, or t
  misc_feature (1156)..(1156): n is a, c, g, or t
  misc_feature (1162)..(1164): n is a, c, g, or t
  misc_feature (1167)..(1168): n is a, c, g, or t
  misc_feature (1175)..(1176): n is a, c, g, or t
  misc_feature (1181)..(1182): n is a, c, g, or t
  misc_feature (1184)..(1184): n is a, c, g, or t
  misc_feature (1188)..(1188): n is a, c, g, or t
  misc_feature (1194)..(1195): n is a, c, g, or t
  misc_feature (1200)..(1200): n is a, c, g, or t
natttagagaaattactatgagaggatcgcatcaccatcaccatcacggatcctatttaggtgacactatagaatcgtcgacccacgcgtccggcctccgccttcggaggctgacgcgcccgggcgccgttccaggcctgtgcagggcggatcggcagccgcctggcggcgatccagggcggtgcggggcctgggcgggagccgggaggcgcggccggcatggaggcgctgctgctgggcgcggggttgctgctgggcgcttacgtgcttgtctactacaacctggtgaaggccccgccgtgcggcggcatgggcaacctgcggggccgcacggccgtggtcacgggcgccaacagcggcatcnnaaagatgacggcgctggagctggcgcgccggggagcgcgcgtggtgctggcctgccncagccaggagcgcggggaggcggctgccttcgacctccgccaggagagtgggaacaatgaggtcatcttcatggccttgnacttggccagtctggcctcggtgcgggcctttgccactgcctttctgagctctgagccacgnttggacatcctcatccacaatgncggtatcagttcctgtggccggacccgtgangcgtttaanctgctgcttcgngtgaaccatatcggtccctttctgctnacaaatctgctgctgccttgcctgaaagnatgtgcccctaaccacgtgatgntggtaacctcanctgcccactgtcngnaaacgtnttgaacttcaaacgcnctggacngcccaatgtttgngctngcntnangaantncgggnnatatnnttaacantaanctggctaatntanttntttgcccnggaacttcncccaacaacctttgaanntctnnttggnnttcancntnttntncnatccccancaaaaantcntgttaaattcnnaaantttttccntgcaacaannttccttgaantgttncncccantttttnnaccccattnggnntttggnttgcttctttcngcaaaaaaaaaanagtatncccnnaanaccccctnaatttttggnnnaaaaaaaaataantccacccccccanatngaaaaaanattttttccnaanntcctttnaaaaaaaaatcttttaattnanaaaaaanancntataannncannttttatnngaaanncnaaanaaaatnnaatan

SEQ ID NO: 986 - DNA, 1246 bp, Homo Sapiens
  misc_feature (3)..(3): n is a, c, g, or t
  misc_feature (942)..(942): n is a, c, g, or t
  misc_feature (947)..(947): n is a, c, g, or t
  misc_feature (955)..(955): n is a, c, g, or t
  misc_feature (976)..(976): n is a, c, g, or t
  misc_feature (987)..(987): n is a, c, g, or t
  misc_feature (992)..(992): n is a, c, g, or t
  misc_feature (1004)..(1004): n is a, c, g, or t
  misc_feature (1033)..(1033): n is a, c, g, or t
  misc_feature (1058)..(1058): n is a, c, g, or t
  misc_feature (1070)..(1070): n is a, c, g, or t
  misc_feature (1075)..(1075): n is a, c, g, or t
  misc_feature (1080)..(1080): n is a, c, g, or t
  misc_feature (1090)..(1090): n is a, c, g, or t
  misc_feature (1103)..(1103): n is a, c, g, or t
  misc_feature (1114)..(1114): n is a, c, g, or t
  misc_feature (1123)..(1123): n is a, c, g, or t
  misc_feature (1129)..(1129): n is a, c, g, or t
  misc_feature (1133)..(1134): n is a, c, g, or t
  misc_feature (1144)..(1144): n is a, c, g, or t
  misc_feature (1147)..(1147): n is a, c, g, or t
  misc_feature (1164)..(1164): n is a, c, g, or t
  misc_feature (1179)..(1179): n is a, c, g, or t
  misc_feature (1182)..(1182): n is a, c, g, or t
  misc_feature (1185)..(1185): n is a, c, g, or t
  misc_feature (1198)..(1198): n is a, c, g, or t
  misc_feature (1201)..(1201): n is a, c, g, or t
  misc_feature (1203)..(1203): n is a, c, g, or t
  misc_feature (1216)..(1216): n is a, c, g, or t
  misc_feature (1226)..(1226): n is a, c, g, or t
  misc_feature (1237)..(1237): n is a, c, g, or t
  misc_feature (1241)..(1241): n is a, c, g, or t
canttagagaaattactatgagaggatcgcatcaccatcaccatcacggatcctatttaggtgacactatagaatcgtcgacccacgcgtccgagaaacctcatgaatgtagtgaatgtgggaaagtctttagccagaggtcccaccttgtcacacaccagaaaatccacactggagagaagccctatcagtgcactgaatgtgaaaaagccttcaggcggcgttcactccttattcaacgtcggagaattcatagtggtgagaaaccctatgaatgtaaggaatgtgggaaactcttcatgtggcacacagctttcctcaaacatcagagactgcatgctggagagaaacttgaagaatgtgagaaaaccttcagcaaggatgaggagcttaggggagagcagaaaattcaccaagaagagaaagcttattggtgtaatcagtgtggtagggctttccagggcagctcagacctcatcggacatcaggtaactcatacaggagagaaaccatatgaatgtaaagaatgtgggaaaactttcaatcagagctcagaccttctgagacatcatagaattcacagtggagaaaaaccttatgtatgcaacaaatgtgggaaatcttttaggggcagctcagatcttattagacaccatcgtgttcatactggagagaaaccctatgaatgccctgaatgttggaaggccttcagtcagaactcacaccttgtcagtcatcaaagaattcataccagagagaaaccctttgaatgtagcaactgtggtaaggccttcagtgggtggacagcttttcttaagcaccagaaacttcacattggaaaggaatttgaagactgtaagagtctacaaacagggacctattctaataggtagcagaaacctaatgaatgcagtaaaactaggaaaagtctgatggagaccncatcnttattgcnctacaaatggagttttattanaaaaaaacccntgggnaaggggggaaanccaaaaaaaaatacctactggaatttttncaaccgtaagtataatccaagtggnaaaagcccaaangcctnttggnaaataatccnccttttttttttnctgtcccaaanctgaccctnaaaaantggnnccccaccaanacnaatttttttaaaatttnttttttttttttaancanaanaaaaaaatgaggntcncncttttttgccccngggccgggantttaacccttngggncccca

SEQ ID NO: 987 - DNA, 1391 bp, Homo Sapiens
  misc_feature (744)..(744): n is a, c, g, or t
  misc_feature (886)..(886): n is a, c, g, or t
  misc_feature (913)..(913): n is a, c, g, or t
  misc_feature (929)..(930): n is a, c, g, or t
  misc_feature (945)..(945): n is a, c, g, or t
  misc_feature (948)..(948): n is a, c, g, or t
  misc_feature (956)..(956): n is a, c, g, or t
  misc_feature (971)..(971): n is a, c, g, or t
  misc_feature (976)..(976): n is a, c, g, or t
  misc_feature (1010)..(1010): n is a, c, g, or t
  misc_feature (1018)..(1018): n is a, c, g, or t
  misc_feature (1031)..(1031): n is a, c, g, or t
  misc_feature (1036)..(1036): n is a, c, g, or t
  misc_feature (1048)..(1048): n is a, c, g, or t
  misc_feature (1057)..(1057): n is a, c, g, or t
  misc_feature (1059)..(1059): n is a, c, g, or t
  misc_feature (1074)..(1074): n is a, c, g, or t
  misc_feature (1076)..(1077): n is a, c, g, or t
  misc_feature (1079)..(1079): n is a, c, g, or t
  misc_feature (1084)..(1084): n is a, c, g, or t
  misc_feature (1091)..(1091): n is a, c, g, or t
  misc_feature (1097)..(1097): n is a, c, g, or t
  misc_feature (1108)..(1108): n is a, c, g, or t
  misc_feature (1139)..(1142): n is a, c, g, or t
  misc_feature (1153)..(1153): n is a, c, g, or t
  misc_feature (1157)..(1157): n is a, c, g, or t
  misc_feature (1161)..(1161): n is a, c, g, or t
  misc_feature (1167)..(1167): n is a, c, g, or t
  misc_feature (1176)..(1176): n is a, c, g, or t
  misc_feature (1178)..(1178): n is a, c, g, or t
  misc_feature (1180)..(1180): n is a, c, g, or t
  misc_feature (1184)..(1184): n is a, c, g, or t
  misc_feature (1197)..(1197): n is a, c, g, or t
  misc_feature (1208)..(1208): n is a, c, g, or t
  misc_feature (1211)..(1212): n is a, c, g, or t
  misc_feature (1218)..(1218): n is a, c, g, or t
  misc_feature (1223)..(1223): n is a, c, g, or t
  misc_feature (1230)..(1230): n is a, c, g, or t
  misc_feature (1251)..(1251): n is a, c, g, or t
  misc_feature (1271)..(1271): n is a, c, g, or t
  misc_feature (1276)..(1276): n is a, c, g, or t
  misc_feature (1278)..(1278): n is a, c, g, or t
  misc_feature (1286)..(1287): n is a, c, g, or t
  misc_feature (1291)..(1291): n is a, c, g, or t
  misc_feature (1318)..(1319): n is a, c, g, or t
  misc_feature (1322)..(1323): n is a, c, g, or t
  misc_feature (1329)..(1329): n is a, c, g, or t
  misc_feature (1332)..(1332): n is a, c, g, or t
  misc_feature (1341)..(1341): n is a, c, g, or t
  misc_feature (1356)..(1356): n is a, c, g, or t
  misc_feature (1359)..(1359): n is a, c, g, or t
  misc_feature (1364)..(1364): n is a, c, g, or t
  misc_feature (1370)..(1370): n is a, c, g, or t
  misc_feature (1376)..(1376): n is a, c, g, or t
  misc_feature (1379)..(1379): n is a, c, g, or t
  misc_feature (1391)..(1391): n is a, c, g, or t
tagagaaattactatgagaggatcgcatcaccatcaccatcacggatcctatttaggtgacactatagaatcgtcgacccacgcgatccgatcgattggggccggggacgcggagcaggtggccgcggcggggcagctgggccgccagcttggtgcctcggggaccgtctcccgctgctttggtcaccagcccctgcccgcccgacccgctccgttctccggcctgcgagccctgccggccggactttgcgccgcgtccggcgctgctgctgcgctcggggccccgctcggcgccggcggtgaccgggaagcccgcgttaaaggggcaaccgggaccctggcccggtatggctgaagtcagcatcgaccagtccaagctgcctggagtcaaggaagtatgccgagattttgctgtcctggaggaccacaccctggctcacagcctgcaggaacaagagattgagcatcatttggcatcgaacgttcagcggaaccgtttggtccagcatgatctccaggtggctaagcagctccaagaggaagatctgaaagcgcaggcccagctccagaagcgctacaaagaccttgaacaacaagactgtgaaattgctcaggaaattcaggagaagctggctattgaggcagagagacgacgcattcaggagaagaaggatgaggacatagctcgccttttgcaagaaaaggagttacaggaagagaaaaagagaaagaaacactttccanagttccctgcaacccgtgcttatgcagatagttactattatgaagatggaggaatgaagccaagagtgatgaaagaagctgtatctactccatcacgaatggcccacagggatcaggaatggtatgatgctgaaattgccanaaaactgcaaagaaaaaaaatttttgnctacccaagtggaaannaaaagccgctcaaantanctcaaaangaaaaaatcgcttcnacttntaatggctgaaaaaaaaaaagcttaaaaaaaaancaaggaanggaaaaaatcatntttgnaaaaaaaaaaanaaaaccccnantggaaaccaaaaaananntnaagcnccaattncaagtncaaaaaaaaanaaaaactccccattttaaaaaggaaaggccnnnnggccccccccncttntctnaaaaangggaaaaancnantaancctttttaaaacnacaaattcccnggnnttttcnaaaanaaaaccnttaaaggttttttaaaaaatnaaaaaaaaatttctaaaaanaaccncnaaaaaatnngggnaaaaaaaaatccattattttttccggnntgnnccggantancccggtttnacaaaaatttttttnttnaagtntttttntaaacnggnaaaaaaaatttn

SEQ ID NO: 988 - DNA, 1340 bp, Homo Sapiens
  misc_feature (1)..(1): n is a, c, g, or t
  misc_feature (869)..(869): n is a, c, g, or t
  misc_feature (930)..(930): n is a, c, g, or t
  misc_feature (969)..(969): n is a, c, g, or t
  misc_feature (975)..(975): n is a, c, g, or t
  misc_feature (982)..(983): n is a, c, g, or t
  misc_feature (991)..(991): n is a, c, g, or t
  misc_feature (1005)..(1005): n is a, c, g, or t
  misc_feature (1016)..(1016): n is a, c, g, or t
  misc_feature (1020)..(1020): n is a, c, g, or t
  misc_feature (1025)..(1025): n is a, c, g, or t
  misc_feature (1031)..(1031): n is a, c, g, or t
  misc_feature (1037)..(1037): n is a, c, g, or t
  misc_feature (1044)..(1044): n is a, c, g, or t
  misc_feature (1057)..(1057): n is a, c, g, or t
  misc_feature (1069)..(1069): n is a, c, g, or t
  misc_feature (1074)..(1074): n is a, c, g, or t
  misc_feature (1086)..(1086): n is a, c, g, or t
  misc_feature (1088)..(1088): n is a, c, g, or t
  misc_feature (1090)..(1090): n is a, c, g, or t
  misc_feature (1098)..(1098): n is a, c, g, or t
  misc_feature (1101)..(1101): n is a, c, g, or t
  misc_feature (1111)..(1112): n is a, c, g, or t
  misc_feature (1126)..(1126): n is a, c, g, or t
  misc_feature (1153)..(1153): n is a, c, g, or t
  misc_feature (1160)..(1160): n is a, c, g, or t
  misc_feature (1173)..(1173): n is a, c, g, or t
  misc_feature (1176)..(1176): n is a, c, g, or t
  misc_feature (1181)..(1181): n is a, c, g, or t
  misc_feature (1187)..(1189): n is a, c, g, or t
  misc_feature (1200)..(1200): n is a, c, g, or t
  misc_feature (1211)..(1211): n is a, c, g, or t
  misc_feature (1213)..(1213): n is a, c, g, or t
  misc_feature (1221)..(1221): n is a, c, g, or t
  misc_feature (1225)..(1225): n is a, c, g, or t
  misc_feature (1233)..(1233): n is a, c, g, or t
  misc_feature (1235)..(1236): n is a, c, g, or t
  misc_feature (1239)..(1239): n is a, c, g, or t
  misc_feature (1241)..(1241): n is a, c, g, or t
  misc_feature (1245)..(1245): n is a, c, g, or t
  misc_feature (1247)..(1247): n is a, c, g, or t
  misc_feature (1251)..(1253): n is a, c, g, or t
  misc_feature (1259)..(1260): n is a, c, g, or t
  misc_feature (1262)..(1265): n is a, c, g, or t
  misc_feature (1274)..(1274): n is a, c, g, or t
  misc_feature (1276)..(1278): n is a, c, g, or t
  misc_feature (1290)..(1290): n is a, c, g, or t
  misc_feature (1294)..(1294): n is a, c, g, or t
  misc_feature (1301)..(1302): n is a, c, g, or t
  misc_feature (1308)..(1309): n is a, c, g, or t
  misc_feature (1319)..(1322): n is a, c, g, or t
  misc_feature (1328)..(1328): n is a, c, g, or t
  misc_feature (1335)..(1336): n is a, c, g, or t
  misc_feature (1340)..(1340): n is a, c, g, or t
naattagagaaattactatgagaggatcgcatcaccatcaccatcacggatcctatttaggtgacactatagaatcgtcgacccacgcgtccgcccacgcgtccgggaacatggggctgtacgctgcggtggcaggcgtgctggccggcgtggagagccgccagggctctatcaaggggctggtgtactccagcaacttccagaacgtgaagcagctgtacgcgctggtgtgcgaaacgcagcgctactccgccgtgctggatgccgtgatctccagcgccggcctcctcagtgcgaagaagctgcagccgcacctggccaagggtaggggcggggcggggaagtgaaccccgacggtcagcgctttgtcatctggtttcagccccgctgccgtgcacggcgggactggagcaagtcgctcacctgaaatgagtatgagcagaccttccctgggttacgaattgagatgggatgaaaatgctttaacttcgagtgttttgaaggattaaataaccgaagtacaaagtagtagtagcggagacagtaaggaagtcgggcgtggcggcgcgcacctgtggtcccagctactcggaaggctgaggggggaggatcacttgagcccaggagttcgaagctgcagtgagctgtgatgtggccactgcacttcagcctgggcgacagatctagaccccattctaaaaaaaaacaaaaaccccaaacccacacccacgaaagggtaatgttggcaagaagttgggtgcagaggtctactggtgaacatctgtggggaaagggtctaaggctgggaagcgagacgcccaggttccgatcctgttgtgtagttaatttctggtgtggtcttgagtaangtaccccacctttatctgtaaccatctagtcaggtgatctctttagccattccagtgcccngggctctattaaagttagttctaagcattcatacttctngcttanggcgttnntgtctttnaatccctcatcccnaggtgctaatntaanaattnttgggnaaaggncttttcnagggggttggggnccaatggaaagnttttntttggaacgccncnanccaagggnttnaattggctcnnctcaaggttcttcnggggtgtgaacctggccatgaaaaacntttttgnaaatgggaatccnagnccttntcccannnaaacttgaaanaatttaaaggncngggaaaangggnaaaatttncnncgncnaaancngggnnnttgggnncnnnnaaacccccnannnccccaattttgngggnaaaaccnnaaaacnncccccttttnnnntttttnaaaaaanntttn

SEQ ID NO: 989 - DNA, 1407 bp, Homo Sapiens
  misc_feature (758)..(758): n is a, c, g, or t
  misc_feature (856)..(856): n is a, c, g, or t
  misc_feature (891)..(891): n is a, c, g, or t
  misc_feature (906)..(906): n is a, c, g, or t
  misc_feature (937)..(937): n is a, c, g, or t
  misc_feature (939)..(939): n is a, c, g, or t
  misc_feature (945)..(945): n is a, c, g, or t
  misc_feature (959)..(959): n is a, c, g, or t
  misc_feature (963)..(963): n is a, c, g, or t
  misc_feature (967)..(967): n is a, c, g, or t
  misc_feature (975)..(975): n is a, c, g, or t
  misc_feature (977)..(977): n is a, c, g, or t
  misc_feature (987)..(987): n is a, c, g, or t
  misc_feature (1005)..(1005): n is a, c, g, or t
  misc_feature (1018)..(1018): n is a, c, g, or t
  misc_feature (1022)..(1022): n is a, c, g, or t
  misc_feature (1030)..(1030): n is a, c, g, or t
  misc_feature (1033)..(1033): n is a, c, g, or t
  misc_feature (1036)..(1036): n is a, c, g, or t
  misc_feature (1041)..(1041): n is a, c, g, or t
  misc_feature (1045)..(1045): n is a, c, g, or t
  misc_feature (1060)..(1061): n is a, c, g, or t
  misc_feature (1065)..(1065): n is a, c, g, or t
  misc_feature (1069)..(1069): n is a, c, g, or t
  misc_feature (1079)..(1079): n is a, c, g, or t
  misc_feature (1081)..(1081): n is a, c, g, or t
  misc_feature (1083)..(1083): n is a, c, g, or t
  misc_feature (1086)..(1086): n is a, c, g, or t
  misc_feature (1092)..(1092): n is a, c, g, or t
  misc_feature (1096)..(1096): n is a, c, g, or t
  misc_feature (1098)..(1098): n is a, c, g, or t
  misc_feature (1100)..(1101): n is a, c, g, or t
  misc_feature (1105)..(1105): n is a, c, g, or t
  misc_feature (1110)..(1110): n is a, c, g, or t
  misc_feature (1112)..(1112): n is a, c, g, or t
  misc_feature (1118)..(1118): n is a, c, g, or t
  misc_feature (1120)..(1121): n is a, c, g, or t
  misc_feature (1123)..(1123): n is a, c, g, or t
  misc_feature (1126)..(1126): n is a, c, g, or t
  misc_feature (1140)..(1140): n is a, c, g, or t
  misc_feature (1144)..(1144): n is a, c, g, or t
  misc_feature (1146)..(1147): n is a, c, g, or t
  misc_feature (1156)..(1156): n is a, c, g, or t
  misc_feature (1168)..(1168): n is a, c, g, or t
  misc_feature (1173)..(1173): n is a, c, g, or t
  misc_feature (1177)..(1177): n is a, c, g, or t
  misc_feature (1181)..(1181): n is a, c, g, or t
  misc_feature (1184)..(1184): n is a, c, g, or t
  misc_feature (1188)..(1188): n is a, c, g, or t
  misc_feature (1196)..(1196): n is a, c, g, or t
  misc_feature (1199)..(1200): n is a, c, g, or t
  misc_feature (1203)..(1203): n is a, c, g, or t
  misc_feature (1205)..(1205): n is a, c, g, or t
  misc_feature (1207)..(1207): n is a, c, g, or t
  misc_feature (1211)..(1211): n is a, c, g, or t
  misc_feature (1214)..(1214): n is a, c, g, or t
  misc_feature (1222)..(1222): n is a, c, g, or t
  misc_feature (1224)..(1224): n is a, c, g, or t
  misc_feature (1229)..(1229): n is a, c, g, or t
  misc_feature (1243)..(1243): n is a, c, g, or t
  misc_feature (1250)..(1251): n is a, c, g, or t
  misc_feature (1253)..(1254): n is a, c, g, or t
  misc_feature (1265)..(1265): n is a, c, g, or t
  misc_feature (1268)..(1268): n is a, c, g, or t
  misc_feature (1272)..(1276): n is a, c, g, or t
  misc_feature (1278)..(1283): n is a, c, g, or t
  misc_feature (1285)..(1291): n is a, c, g, or t
  misc_feature (1293)..(1293): n is a, c, g, or t
  misc_feature (1296)..(1298): n is a, c, g, or t
  misc_feature (1300)..(1300): n is a, c, g, or t
  misc_feature (1302)..(1302): n is a, c, g, or t
  misc_feature (1305)..(1305): n is a, c, g, or t
  misc_feature (1309)..(1312): n is a, c, g, or t
  misc_feature (1322)..(1322): n is a, c, g, or t
  misc_feature (1333)..(1333): n is a, c, g, or t
  misc_feature (1335)..(1336): n is a, c, g, or t
  misc_feature (1342)..(1344): n is a, c, g, or t
  misc_feature (1349)..(1351): n is a, c, g, or t
  misc_feature (1354)..(1355): n is a, c, g, or t
  misc_feature (1358)..(1359): n is a, c, g, or t
  misc_feature (1361)..(1361): n is a, c, g, or t
  misc_feature (1363)..(1364): n is a, c, g, or t
  misc_feature (1366)..(1367): n is a, c, g, or t
  misc_feature (1371)..(1371): n is a, c, g, or t
  misc_feature (1373)..(1375): n is a, c, g, or t
  misc_feature (1381)..(1387): n is a, c, g, or t
  misc_feature (1393)..(1395): n is a, c, g, or t
  misc_feature (1398)..(1398): n is a, c, g, or t
  misc_feature (1400)..(1402): n is a, c, g, or t
  misc_feature (1406)..(1407): n is a, c, g, or t
aatagagagattactatgagaggatcgcatcaccatcaccatcacggatcctatttaggtgacactatagaatcgtcgacccacgcgtccgggcccttctttctgtttgagctgcatttggaagtgttgtggagacagccccgtagcccaatgcgaccagactcagggaaaacatcaggcccctccagctgagcccttgtgtgagccccgcccctccctaaatgccagacttgggagctgacagacagcactgcctgtgctgggtttaaaagtcctggtcagctgagtggaaatagaaggatttctgctgccatcatcttccatgggctttccaggtcacacgacctacaagtagggagcagggaaagaagagtgagcctgcatgccaattctaagctcttcaggatcaaatgtcgttcgtcctgtccagaatggcagcctgtggaggcacctgcaagaacaaagtgactgtgtccaagcccgtgtgggacttcctgagcaaagagaccccagcccggctggcccggcttcgggaggagcaccgtgtgtccatcctcatagatggcgagacttctgacatctatgttctccagctttccccacagggtcctcccccggcccctccaaatgggctctacctagcccggaaggctctcaaggggctgctaaaagaggcagagaaagagctgaagaaagctcagaggcagggggagctgatgggctgcctggctctggggggtggaggggagcaccctganatgcaccgcgcaggcccaccccctctctgagcagccccacttctgccccccaggagctcggggggctccccccctcctcttccccccctaaccccacntcttcctcctcgcctttcgggaggaggcaaaaaancaggaaaacacctgnccccatctgtctgggggaaatcccaaaatgncnaaaaanttgaaaaaatgccnggcnttcntttctgcnangggctgcatnccccggggctctgcaggngaaaaaggcctgncccntgggcggnccnctncctanaagngaagtccaattaaannttanttanctgaacttgnantnccngttganaaancncnnaaangaccncnaaaatncnntnggnattttttaaaaccntcgntnnccccggggnttttttttgggnaaaanccanctanttnggcnaattttcngannaanancntaanggnaaaaaaancnggganaccccctttaattncccgggnncnnaaaaaattttnggntttnnnnntnnnnnnannnnnnnanaannntncnggntaannnntttttaaacnaaaaaaaaaanannttttcnnnttttnnnttnnccnnananncnnattnannnaaaaannnnnnnttaaannnccntnnncctnn

SEQ ID NO: 990 - DNA, 1200 bp, Homo Sapiens
  misc_feature (1)..(1): n is a, c, g, or t
  misc_feature (751)..(751): n is a, c, g, or t
  misc_feature (791)..(791): n is a, c, g, or t
  misc_feature (805)..(805): n is a, c, g, or t
  misc_feature (833)..(833): n is a, c, g, or t
  misc_feature (875)..(875): n is a, c, g, or t
  misc_feature (884)..(884): n is a, c, g, or t
  misc_feature (886)..(886): n is a, c, g, or t
  misc_feature (915)..(915): n is a, c, g, or t
  misc_feature (928)..(928): n is a, c, g, or t
  misc_feature (940)..(940): n is a, c, g, or t
  misc_feature (980)..(980): n is a, c, g, or t
  misc_feature (982)..(982): n is a, c, g, or t
  misc_feature (986)..(986): n is a, c, g, or t
  misc_feature (988)..(988): n is a, c, g, or t
  misc_feature (994)..(994): n is a, c, g, or t
  misc_feature (997)..(997): n is a, c, g, or t
  misc_feature (1002)..(1002): n is a, c, g, or t
  misc_feature (1005)..(1005): n is a, c, g, or t
  misc_feature (1007)..(1007): n is a, c, g, or t
  misc_feature (1011)..(1011): n is a, c, g, or t
  misc_feature (1018)..(1018): n is a, c, g, or t
  misc_feature (1021)..(1021): n is a, c, g, or t
  misc_feature (1025)..(1025): n is a, c, g, or t
  misc_feature (1035)..(1035): n is a, c, g, or t
  misc_feature (1039)..(1039): n is a, c, g, or t
  misc_feature (1043)..(1044): n is a, c, g, or t
  misc_feature (1049)..(1049): n is a, c, g, or t
  misc_feature (1057)..(1058): n is a, c, g, or t
  misc_feature (1078)..(1079): n is a, c, g, or t
  misc_feature (1083)..(1084): n is a, c, g, or t
  misc_feature (1087)..(1088): n is a, c, g, or t
  misc_feature (1092)..(1092): n is a, c, g, or t
  misc_feature (1094)..(1094): n is a, c, g, or t
  misc_feature (1101)..(1103): n is a, c, g, or t
  misc_feature (1107)..(1107): n is a, c, g, or t
  misc_feature (1109)..(1110): n is a, c, g, or t
  misc_feature (1113)..(1114): n is a, c, g, or t
  misc_feature (1116)..(1116): n is a, c, g, or t
  misc_feature (1118)..(1118): n is a, c, g, or t
  misc_feature (1120)..(1120): n is a, c, g, or t
  misc_feature (1127)..(1127): n is a, c, g, or t
  misc_feature (1130)..(1135): n is a, c, g, or t
  misc_feature (1146)..(1152): n is a, c, g, or t
  misc_feature (1159)..(1159): n is a, c, g, or t
  misc_feature (1163)..(1170): n is a, c, g, or t
  misc_feature (1172)..(1176): n is a, c, g, or t
  misc_feature (1182)..(1186): n is a, c, g, or t
  misc_feature (1189)..(1192): n is a, c, g, or t
  misc_feature (1194)..(1196): n is a, c, g, or t
  misc_feature (1198)..(1200): n is a, c, g, or t
ntatagagagaattactatgagaggatcgcatcaccatcaccatcacggatcctatttaggtgacactatagaatcgtcgacccacgcgtccggtttcgtgatgggttggttcttttgctgcctgtttgtggtctatttgtaggatagtttagttcccagacagtttgtgtctaatttgatcttcttggacattgtccctcatggccaccagattctaatgccataaggccccagctggttccccatcacagaaccacccagcaggaagccgggggtacaatgacctcggccacacagagcgctcgtgctttcagcagagcgcctccacagacaagcctgtggccagccctgccctccagcctcgagctggagttgctccagaggcagccccagcaggcctccctccacatagaggtggctgggccaattgcccaaacacgtgagacacacagggagctttatgtgttcatcttcctgctttagaacttgctcccggtcttggtttttctgaggaaaagcccacagtggttcccctgcccctcccatacctccctatctgccgtctgtctctttgggccctggtctgacagttttcatctgaggcctcctcgggagcaggagacttaagggttcatcccgaccttagttcacagagcctagctgggtgcatcccagccgcagggggtgagaagacacccagagatgggggacaatgctcaggtgggggcctcctccgagactctggttganaggaaagcacatgattcaagcctaccccacaaaaaaggancacaaaatgctcanaaaatggccctttcctccctgcagtganctaagacaaagggaaagggccacaccccattttcaaaaaaantggactgangngctctgctcaatttggggtctgctttaantgaacccaaaaanctcaagttccanatggaaaactccagggggggtccttctggcccctctggcnancccnanccaaanaantcccnatnancccnaggaaantgnggangccagggctnaaantgcnncaagnttaaccannggatttttgcccaaaaaagnntttnnccnngggnanttttttnnngaanannaanngncntnttgttgnaannnnnntttggccttgnnnnnnncaaaaanccannnnnnnntnnnnnaaaaannnnnaannnnannntnnn

SEQ ID NO: 991 - DNA, 836 bp, Homo Sapiens
  misc_feature (768)..(814): n is a, c, g, or t
  misc_feature (827)..(827): n is a, c, g, or t
  misc_feature (833)..(833): n is a, c, g, or t
  misc_feature (836)..(836): n is a, c, g, or t
aaagagagattactatgagaggatcgcatcaccatcaccatcacggatcctatttaggtgacactatagaatcgtcgacccacgcgtccgaattttgttgtgtgtttagaagtgaccttacctttaacacctgtggagttagtgcgtgcacattgctggctcagcgtaacccatcacgggaccggaggagaggagagcggggaagaggagagcagcttcaggccgtggtgtctcccacgtctgtgttcttatttgcagctcagggtttgcattcccaggtagaacaggtgtcgtacactgtgaaatgttccaggttatttgtttataatgtgtgtgtcatatacagatagctccgatgacatctgaagttgtgacttcatcatcttgtcatatttctgtatgatgagccccagggcccatcctgaggtctgctagccatgtgcttagtctcacctccccagcccacgctggcattaccacccagagacccttcagtgctgtgtgtttttcctttttagggttacttttgactcacagtgttaggcaagccagcttggaagttaacttttaaaaaaattcaattgaagctgtaaagtataatatatagattggaagtcaccagaaattgttttagtttgtgaattcccccagtgtatgttctgaaaagaaaatgggagagcttgtaaagcatctcctaaatgcgaagccgcgtgaccctggacttctggcacatctgaataaacatgttcttattctggaaaaaaaaannnnnnnnnnnnnnnnnnnnnnnnnnnnnnnnnnnnnnnnnnnnnnnaagggcggccgcnccctanagn

SEQ ID NO: 992 - DNA, 1377 bp, Homo Sapiens
  misc_feature (903)..(903): n is a, c, g, or t
  misc_feature (957)..(957): n is a, c, g, or t
  misc_feature (966)..(966): n is a, c, g, or t
  misc_feature (973)..(973): n is a, c, g, or t
  misc_feature (981)..(981): n is a, c, g, or t
  misc_feature (997)..(997): n is a, c, g, or t
  misc_feature (1008)..(1009): n is a, c, g, or t
  misc_feature (1027)..(1027): n is a, c, g, or t
  misc_feature (1034)..(1034): n is a, c, g, or t
  misc_feature (1065)..(1065): n is a, c, g, or t
  misc_feature (1069)..(1069): n is a, c, g, or t
  misc_feature (1071)..(1071): n is a, c, g, or t
  misc_feature (1076)..(1076): n is a, c, g, or t
  misc_feature (1079)..(1079): n is a, c, g, or t
  misc_feature (1086)..(1086): n is a, c, g, or t
  misc_feature (1093)..(1093): n is a, c, g, or t
  misc_feature (1098)..(1098): n is a, c, g, or t
  misc_feature (1104)..(1104): n is a, c, g, or t
  misc_feature (1107)..(1108): n is a, c, g, or t
  misc_feature (1119)..(1119): n is a, c, g, or t
  misc_feature (1122)..(1122): n is a, c, g, or t
  misc_feature (1124)..(1124): n is a, c, g, or t
  misc_feature (1134)..(1134): n is a, c, g, or t
  misc_feature (1136)..(1136): n is a, c, g, or t
  misc_feature (1139)..(1140): n is a, c, g, or t
  misc_feature (1144)..(1145): n is a, c, g, or t
  misc_feature (1148)..(1148): n is a, c, g, or t
  misc_feature (1152)..(1152): n is a, c, g, or t
  misc_feature (1159)..(1159): n is a, c, g, or t
  misc_feature (1176)..(1176): n is a, c, g, or t
  misc_feature (1179)..(1179): n is a, c, g, or t
  misc_feature (1208)..(1208): n is a, c, g, or t
  misc_feature (1222)..(1222): n is a, c, g, or t
  misc_feature (1224)..(1225): n is a, c, g, or t
  misc_feature (1230)..(1231): n is a, c, g, or t
  misc_feature (1247)..(1247): n is a, c, g, or t
  misc_feature (1251)..(1252): n is a, c, g, or t
  misc_feature (1259)..(1261): n is a, c, g, or t
  misc_feature (1263)..(1263): n is a, c, g, or t
  misc_feature (1265)..(1265): n is a, c, g, or t
  misc_feature (1268)..(1268): n is a, c, g, or t
  misc_feature (1298)..(1298): n is a, c, g, or t
  misc_feature (1301)..(1301): n is a, c, g, or t
  misc_feature (1304)..(1304): n is a, c, g, or t
  misc_feature (1306)..(1307): n is a, c, g, or t
  misc_feature (1310)..(1310): n is a, c, g, or t
  misc_feature (1313)..(1313): n is a, c, g, or t
  misc_feature (1317)..(1317): n is a, c, g, or t
  misc_feature (1323)..(1323): n is a, c, g, or t
  misc_feature (1327)..(1329): n is a, c, g, or t
  misc_feature (1334)..(1335): n is a, c, g, or t
  misc_feature (1347)..(1347): n is a, c, g, or t
  misc_feature (1366)..(1367): n is a, c, g, or t
  misc_feature (1373)..(1373): n is a, c, g, or t
tagagaaattactatgagaggatcgcatcaccatcaccatcacggatcctatttaggtgacactatagaatcgtcgacccacgcgtccggggacatggagaagcccatccaggtcatgtgctacgactatgacaatgacgggggccatgacttcatcggcgagttccagacctcagtgtcacagatgtgtgaggctcgagacagcgtcccgctggagttcgagtgcatcaaccccaagaagcagaggaagaagaagaactataaaaactcgggcatcatcatcctgcgatcctgcaagataaaccgagactactccttccttgactacatcctgggaggctgccagctcatgttcaccgttggaatagactttacagcctccaacgggaatcccctcgacccttcctctttgcactatatcaaccctatgggcaccaacgaatatctgtcggccatctgggctgttgggcagatcattcaggactacgacagtgataagatgtttccagctctgggattcggggcccagttacccccagactggaaggtctcccatgagtttgccatcaacttcaaccccaccaaccccttctgctcaggtgtggatggtattgcccaggcgtactcagcttgcctgccccacatccgcttctacggtcctaccaatttctcccccatcgtcaaccacgtggcccggtttgcggcccaggccacacaacagcggacggccacgcagtacttcatcctcctcatcatcacggacggggtcatcagtgacatggaggagacacggcatgccgtggtgcaggcttccaagctgcccatgtccatcatcatcgtgggcgtgggcaatgcggacttcgctgccatggagttcctggatggggacagccgcatgctgcnctcccacacgggggaggaggcagcccgcgatattgtgcagttcgttccttttcnaaagttccncaacgcnagaaaaanaaaccttggcccaaanctgtgcttggnnggacctgcccccaacaanttgtgcngtatttcaagcataaaaacctgcccccccancaantnggaanccncctgaantccatgnccaanaacaanatnntaactgaaccnccngncccccccccngnaanntgannccncctntgcttcntgggggggccttttttnccnatccccttttttttttttaaaacggaccnccccccaatttctncnnccaannggggtttcttttttgnaacnntgttgannntncngcnaaagggttcttcccccccccccccttgccnttnaanannganggntttnaatttngggnnnttttnnaaaaatttttancaaaaaaaaaaaaaagggnncccccnttat

SEQ ID NO: 993 - DNA, 1533 bp, Homo Sapiens
  misc_feature (3)..(3): n is a, c, g, or t
  misc_feature (6)..(6): n is a, c, g, or t
  misc_feature (11)..(11): n is a, c, g, or t
  misc_feature (19)..(19): n is a, c, g, or t
  misc_feature (25)..(25): n is a, c, g, or t
  misc_feature (28)..(28): n is a, c, g, or t
  misc_feature (39)..(39): n is a, c, g, or t
  misc_feature (47)..(48): n is a, c, g, or t
  misc_feature (53)..(53): n is a, c, g, or t
  misc_feature (62)..(62): n is a, c, g, or t
  misc_feature (68)..(68): n is a, c, g, or t
  misc_feature (71)..(71): n is a, c, g, or t
  misc_feature (75)..(75): n is a, c, g, or t
  misc_feature (91)..(91): n is a, c, g, or t
  misc_feature (99)..(99): n is a, c, g, or t
  misc_feature (109)..(109): n is a, c, g, or t
  misc_feature (116)..(116): n is a, c, g, or t
  misc_feature (128)..(128): n is a, c, g, or t
  misc_feature (140)..(140): n is a, c, g, or t
  misc_feature (143)..(144): n is a, c, g, or t
  misc_feature (148)..(148): n is a, c, g, or t
  misc_feature (156)..(156): n is a, c, g, or t
  misc_feature (176)..(176): n is a, c, g, or t
  misc_feature (222)..(222): n is a, c, g, or t
  misc_feature (227)..(227): n is a, c, g, or t
  misc_feature (230)..(230): n is a, c, g, or t
  misc_feature (250)..(250): n is a, c, g, or t
  misc_feature (254)..(255): n is a, c, g, or t
  misc_feature (259)..(261): n is a, c, g, or t
  misc_feature (276)..(276): n is a, c, g, or t
  misc_feature (292)..(294): n is a, c, g, or t
  misc_feature (316)..(316): n is a, c, g, or t
  misc_feature (318)..(318): n is a, c, g, or t
  misc_feature (334)..(334): n is a, c, g, or t
  misc_feature (336)..(336): n is a, c, g, or t
  misc_feature (346)..(346): n is a, c, g, or t
  misc_feature (371)..(371): n is a, c, g, or t
  misc_feature (378)..(378): n is a, c, g, or t
  misc_feature (399)..(399): n is a, c, g, or t
  misc_feature (401)..(402): n is a, c, g, or t
  misc_feature (408)..(408): n is a, c, g, or t
  misc_feature (415)..(415): n is a, c, g, or t
  misc_feature (424)..(424): n is a, c, g, or t
  misc_feature (445)..(445): n is a, c, g, or t
  misc_feature (452)..(452): n is a, c, g, or t
  misc_feature (455)..(455): n is a, c, g, or t
  misc_feature (476)..(476): n is a, c, g, or t
  misc_feature (481)..(481): n is a, c, g, or t
  misc_feature (483)..(483): n is a, c, g, or t
  misc_feature (509)..(509): n is a, c, g, or t
  misc_feature (521)..(521): n is a, c, g, or t
  misc_feature (534)..(534): n is a, c, g, or t
  misc_feature (538)..(538): n is a, c, g, or t
  misc_feature (540)..(540): n is a, c, g, or t
  misc_feature (546)..(546): n is a, c, g, or t
  misc_feature (553)..(554): n is a, c, g, or t
  misc_feature (560)..(560): n is a, c, g, or t
  misc_feature (567)..(567): n is a, c, g, or t
  misc_feature (572)..(572): n is a, c, g, or t
  misc_feature (576)..(576): n is a, c, g, or t
  misc_feature (580)..(580): n is a, c, g, or t
  misc_feature (585)..(585): n is a, c, g, or t
  misc_feature (589)..(589): n is a, c, g, or t
  misc_feature (592)..(593): n is a, c, g, or t
  misc_feature (595)..(595): n is a, c, g, or t
  misc_feature (604)..(604): n is a, c, g, or t
  misc_feature (606)..(606): n is a, c, g, or t
  misc_feature (626)..(626): n is a, c, g, or t
  misc_feature (634)..(634): n is a, c, g, or t
  misc_feature (644)..(644): n is a, c, g, or t
  misc_feature (647)..(648): n is a, c, g, or t
  misc_feature (661)..(661): n is a, c, g, or t
  misc_feature (666)..(666): n is a, c, g, or t
  misc_feature (669)..(669): n is a, c, g, or t
  misc_feature (690)..(690): n is a, c, g, or t
  misc_feature (705)..(705): n is a, c, g, or t
  misc_feature (716)..(716): n is a, c, g, or t
  misc_feature (724)..(724): n is a, c, g, or t
  misc_feature (733)..(733): n is a, c, g, or t
  misc_feature (736)..(736): n is a, c, g, or t
  misc_feature (740)..(740): n is a, c, g, or t
  misc_feature (751)..(751): n is a, c, g, or t
  misc_feature (755)..(755): n is a, c, g, or t
  misc_feature (759)..(759): n is a, c, g, or t
  misc_feature (764)..(765): n is a, c, g, or t
  misc_feature (767)..(767): n is a, c, g, or t
  misc_feature (769)..(770): n is a, c, g, or t
  misc_feature (772)..(772): n is a, c, g, or t
  misc_feature (777)..(777): n is a, c, g, or t
  misc_feature (781)..(781): n is a, c, g, or t
  misc_feature (783)..(783): n is a, c, g, or t
  misc_feature (786)..(786): n is a, c, g, or t
  misc_feature (789)..(789): n is a, c, g, or t
  misc_feature (791)..(791): n is a, c, g, or t
  misc_feature (795)..(795): n is a, c, g, or t
  misc_feature (797)..(797): n is a, c, g, or t
  misc_feature (800)..(801): n is a, c, g, or t
  misc_feature (807)..(808): n is a, c, g, or t
  misc_feature (810)..(810): n is a, c, g, or t
  misc_feature (812)..(813): n is a, c, g, or t
  misc_feature (822)..(823): n is a, c, g, or t
  misc_feature (825)..(825): n is a, c, g, or t
  misc_feature (827)..(827): n is a, c, g, or t
  misc_feature (836)..(836): n is a, c, g, or t
  misc_feature (840)..(840): n is a, c, g, or t
  misc_feature (845)..(847): n is a, c, g, or t
  misc_feature (851)..(852): n is a, c, g, or t
  misc_feature (857)..(857): n is a, c, g, or t
  misc_feature (859)..(859): n is a, c, g, or t
  misc_feature (862)..(862): n is a, c, g, or t
  misc_feature (870)..(870): n is a, c, g, or t
  misc_feature (875)..(875): n is a, c, g, or t
  misc_feature (880)..(880): n is a, c, g, or t
  misc_feature (886)..(886): n is a, c, g, or t
  misc_feature (888)..(889): n is a, c, g, or t
  misc_feature (891)..(891): n is a, c, g, or t
  misc_feature (897)..(898): n is a, c, g, or t
  misc_feature (903)..(903): n is a, c, g, or t
  misc_feature (905)..(905): n is a, c, g, or t
  misc_feature (910)..(911): n is a, c, g, or t
  misc_feature (915)..(915): n is a, c, g, or t
  misc_feature (917)..(917): n is a, c, g, or t
  misc_feature (923)..(923): n is a, c, g, or t
  misc_feature (925)..(927): n is a, c, g, or t
  misc_feature (931)..(931): n is a, c, g, or t
  misc_feature (934)..(934): n is a, c, g, or t
  misc_feature (936)..(936): n is a, c, g, or t
  misc_feature (939)..(942): n is a, c, g, or t
  misc_feature (948)..(948): n is a, c, g, or t
  misc_feature (950)..(950): n is a, c, g, or t
  misc_feature (952)..(953): n is a, c, g, or t
  misc_feature (955)..(957): n is a, c, g, or t
  misc_feature (959)..(959): n is a, c, g, or t
  misc_feature (965)..(965): n is a, c, g, or t
  misc_feature (967)..(968): n is a, c, g, or t
  misc_feature (975)..(976): n is a, c, g, or t
  misc_feature (978)..(978): n is a, c, g, or t
  misc_feature (980)..(984): n is a, c, g, or t
  misc_feature (987)..(987): n is a, c, g, or t
  misc_feature (989)..(989): n is a, c, g, or t
  misc_feature (999)..(999): n is a, c, g, or t
  misc_feature (1007)..(1009): n is a, c, g, or t
  misc_feature (1013)..(1014): n is a, c, g, or t
  misc_feature (1016)..(1018): n is a, c, g, or t
  misc_feature (1022)..(1024): n is a, c, g, or t
  misc_feature (1033)..(1033): n is a, c, g, or t
  misc_feature (1041)..(1041): n is a, c, g, or t
  misc_feature (1044)..(1045): n is a, c, g, or t
  misc_feature (1047)..(1047): n is a, c, g, or t
  misc_feature (1050)..(1051): n is a, c, g, or t
  misc_feature (1056)..(1057): n is a, c, g, or t
  misc_feature (1059)..(1059): n is a, c, g, or t
  misc_feature (1062)..(1062): n is a, c, g, or t
  misc_feature (1077)..(1078): n is a, c, g, or t
  misc_feature (1083)..(1084): n is a, c, g, or t
  misc_feature (1087)..(1087): n is a, c, g, or t
  misc_feature (1093)..(1093): n is a, c, g, or t
  misc_feature (1096)..(1096): n is a, c, g, or t
  misc_feature (1099)..(1099): n is a, c, g, or t
  misc_feature (1101)..(1101): n is a, c, g, or t
  misc_feature (1103)..(1104): n is a, c, g, or t
  misc_feature (1106)..(1107): n is a, c, g, or t
  misc_feature (1109)..(1109): n is a, c, g, or t
  misc_feature (1112)..(1113): n is a, c, g, or t
  misc_feature (1116)..(1116): n is a, c, g, or t
  misc_feature (1119)..(1122): n is a, c, g, or t
  misc_feature (1127)..(1127): n is a, c, g, or t
  misc_feature (1131)..(1131): n is a, c, g, or t
  misc_feature (1133)..(1133): n is a, c, g, or t
  misc_feature (1139)..(1140): n is a, c, g, or t
  misc_feature (1144)..(1144): n is a, c, g, or t
  misc_feature (1150)..(1150): n is a, c, g, or t
  misc_feature (1152)..(1152): n is a, c, g, or t
  misc_feature (1159)..(1160): n is a, c, g, or t
  misc_feature (1163)..(1163): n is a, c, g, or t
  misc_feature (1167)..(1168): n is a, c, g, or t
  misc_feature (1171)..(1171): n is a, c, g, or t
  misc_feature (1173)..(1175): n is a, c, g, or t
  misc_feature (1177)..(1178): n is a, c, g, or t
  misc_feature (1181)..(1181): n is a, c, g, or t
  misc_feature (1187)..(1188): n is a, c, g, or t
  misc_feature (1196)..(1196): n is a, c, g, or t
  misc_feature (1198)..(1199): n is a, c, g, or t
  misc_feature (1202)..(1203): n is a, c, g, or t
  misc_feature (1206)..(1206): n is a, c, g, or t
  misc_feature (1218)..(1218): n is a, c, g, or t
  misc_feature (1220)..(1220): n is a, c, g, or t
  misc_feature (1229)..(1229): n is a, c, g, or t
  misc_feature (1236)..(1236): n is a, c, g, or t
  misc_feature (1240)..(1240): n is a, c, g, or t
  misc_feature (1242)..(1242): n is a, c, g, or t
  misc_feature (1247)..(1247): n is a, c, g, or t
  misc_feature (1249)..(1249): n is a, c, g, or t
  misc_feature (1257)..(1257): n is a, c, g, or t
  misc_feature (1267)..(1267): n is a, c, g, or t
  misc_feature (1272)..(1273): n is a, c, g, or t
  misc_feature (1277)..(1278): n is a, c, g, or t
  misc_feature (1280)..(1280): n is a, c, g, or t
  misc_feature (1286)..(1287): n is a, c, g, or t
  misc_feature (1289)..(1291): n is a, c, g, or t
  misc_feature (1293)..(1293): n is a, c, g, or t
  misc_feature (1297)..(1297): n is a, c, g, or t
  misc_feature (1300)..(1300): n is a, c, g, or t
  misc_feature (1308)..(1309): n is a, c, g, or t
  misc_feature (1315)..(1315): n is a, c, g, or t
  misc_feature (1317)..(1319): n is a, c, g, or t
  misc_feature (1321)..(1321): n is a, c, g, or t
  misc_feature (1331)..(1331): n is a, c, g, or t
  misc_feature (1333)..(1333): n is a, c, g, or t
  misc_feature (1341)..(1341): n is a, c, g, or t
  misc_feature (1343)..(1344): n is a, c, g, or t
  misc_feature (1363)..(1363): n is a, c, g, or t
  misc_feature (1366)..(1366): n is a, c, g, or t
  misc_feature (1368)..(1368): n is a, c, g, or t
  misc_feature (1370)..(1370): n is a, c, g, or t
  misc_feature (1372)..(1372): n is a, c, g, or t
  misc_feature (1376)..(1376): n is a, c, g, or t
  misc_feature (1378)..(1379): n is a, c, g, or t
  misc_feature (1382)..(1382): n is a, c, g, or t
  misc_feature (1388)..(1388): n is a, c, g, or t
  misc_feature (1394)..(1395): n is a, c, g, or t
  misc_feature (1398)..(1398): n is a, c, g, or t
  misc_feature (1400)..(1400): n is a, c, g, or t
  misc_feature (1404)..(1404): n is a, c, g, or t
  misc_feature (1412)..(1412): n is a, c, g, or t
  misc_feature (1414)..(1414): n is a, c, g, or t
  misc_feature (1416)..(1417): n is a, c, g, or t
  misc_feature (1419)..(1419): n is a, c, g, or t
  misc_feature (1421)..(1423): n is a, c, g, or t
  misc_feature (1429)..(1429): n is a, c, g, or t
  misc_feature (1432)..(1432): n is a, c, g, or t
  misc_feature (1437)..(1437): n is a, c, g, or t
  misc_feature (1439)..(1439): n is a, c, g, or t
  misc_feature (1445)..(1447): n is a, c, g, or t
  misc_feature (1449)..(1449): n is a, c, g, or t
  misc_feature (1454)..(1454): n is a, c, g, or t
  misc_feature (1456)..(1456): n is a, c, g, or t
  misc_feature (1458)..(1458): n is a, c, g, or t
  misc_feature (1460)..(1460): n is a, c, g, or t
  misc_feature (1464)..(1464): n is a, c, g, or t
  misc_feature (1471)..(1472): n is a, c, g, or t
  misc_feature (1478)..(1479): n is a, c, g, or t
  misc_feature (1481)..(1482): n is a, c, g, or t
  misc_feature (1496)..(1496): n is a, c, g, or t
  misc_feature (1499)..(1499): n is a, c, g, or t
  misc_feature (1510)..(1510): n is a, c, g, or t
  misc_feature (1513)..(1513): n is a, c, g, or t
  misc_feature (1517)..(1517): n is a, c, g, or t
  misc_feature (1521)..(1521): n is a, c, g, or t
  misc_feature (1525)..(1527): n is a, c, g, or t
  misc_feature (1532)..(1532): n is a, c, g, or t
ganctngacangatacgcnaagctnggnatgccctgccngtcgactnnagggnttctatttnggtganaanaganaatcggtcgacccacncgctccgnggcgtcaggngggtgcnggtttgttcccngcgaacggcacncgnngtcnctcctgantgcgagctacgggaccttcnccatgccggggatggtactcttcggccggcgctgggccatcgccancgacnacntggtcttcccagggttctgnccanntggnnncgcaagtgctgaggnggattggcattctgannntgtatctcatgcacacaggaanantggactgtgctggtgnanccttgctcancagttacttgatcgtcctcatgatnctcctgncaattgtcatatgtactgtgncnnccatcntgtgtgncatcatganaggaacgatttgtaaccctgnaccgcgnaantctatgtctaacctgctttanttccncnctggcgctgttttttccatagatggnctgggcctctcngggggctgcctgngagncnaaatgntgttcanngcccanaggacanttgtnaacngcancatcncaancgnncntgattcaantnggatcatcatcgcctgccanagtggttnccattatcantgnnattgaaccctccntgggnganaaaatggctccatattcctcngcacggccccatccnccttggaaaangccatgantcaaagccnatntacntaaacggcccnactnccanaatcnncntnnanaacgntgtncnaanacnanaatncnacnncctganncngnntgcatttgnnanancacctaacnaaantccgnnntgcnnttttncncgnaaaggcanaaganttttntttcancnnantttttnnaagancnaaacnntggngnccatcncnnnattnaangncgnnnnttcccncntnngnnnantcatananncgaaaannantnnnnnacncnacacaaaccnagcacccnnntagnncnnnccannnccccagganacaccccntgnnanctnnaattnntntgnaaatttataaaccanngcccnntantaatanccntantnannanntnacnnatnggnnnnccccnccanantatacnnaaanccaccncnacggacnnttnaaannaantnnntnnacnaccttnnacaaatanannccnntanttaagaacatgnanacgaagtcntcatctncagntntttcntnccaatccntctgtctacntatcnncacnncnaaatgnntnnntnacanaancttcatcnnataatnannngnttaatatgananctctcatntnnaccttactccactatcaanacntngncntacntnnctnaagacnctaatnncgnangctnctcaccanantnnancnnntagaanacnaatgnanatgatnnntncatcncncnantcantacttanngatatnnannattcatctatacanacncttcatcatanaancatnatcngctnnnacatnt

SEQ ID NO: 994 - DNA, 1480 bp, Homo Sapiens
  misc_feature (8)..(8): n is a, c, g, or t
  misc_feature (103)..(103): n is a, c, g, or t
  misc_feature (167)..(167): n is a, c, g, or t
  misc_feature (308)..(308): n is a, c, g, or t
  misc_feature (310)..(310): n is a, c, g, or t
  misc_feature (414)..(414): n is a, c, g, or t
  misc_feature (484)..(484): n is a, c, g, or t
  misc_feature (489)..(489): n is a, c, g, or t
  misc_feature (493)..(493): n is a, c, g, or t
  misc_feature (515)..(515): n is a, c, g, or t
  misc_feature (531)..(531): n is a, c, g, or t
  misc_feature (538)..(538): n is a, c, g, or t
  misc_feature (541)..(541): n is a, c, g, or t
  misc_feature (558)..(558): n is a, c, g, or t
  misc_feature (561)..(561): n is a, c, g, or t
  misc_feature (572)..(572): n is a, c, g, or t
  misc_feature (579)..(580): n is a, c, g, or t
  misc_feature (583)..(583): n is a, c, g, or t
  misc_feature (585)..(585): n is a, c, g, or t
  misc_feature (587)..(587): n is a, c, g, or t
  misc_feature (596)..(596): n is a, c, g, or t
  misc_feature (608)..(609): n is a, c, g, or t
  misc_feature (613)..(613): n is a, c, g, or t
  misc_feature (626)..(626): n is a, c, g, or t
  misc_feature (633)..(633): n is a, c, g, or t
  misc_feature (643)..(643): n is a, c, g, or t
  misc_feature (649)..(649): n is a, c, g, or t
  misc_feature (651)..(651): n is a, c, g, or t
  misc_feature (654)..(654): n is a, c, g, or t
  misc_feature (657)..(657): n is a, c, g, or t
  misc_feature (661)..(661): n is a, c, g, or t
  misc_feature (664)..(664): n is a, c, g, or t
  misc_feature (670)..(671): n is a, c, g, or t
  misc_feature (676)..(676): n is a, c, g, or t
  misc_feature (679)..(679): n is a, c, g, or t
  misc_feature (687)..(687): n is a, c, g, or t
  misc_feature (690)..(690): n is a, c, g, or t
  misc_feature (697)..(697): n is a, c, g, or t
  misc_feature (705)..(705): n is a, c, g, or t
  misc_feature (708)..(708): n is a, c, g, or t
  misc_feature (710)..(710): n is a, c, g, or t
  misc_feature (714)..(714): n is a, c, g, or t
  misc_feature (729)..(729): n is a, c, g, or t
  misc_feature (731)..(731): n is a, c, g, or t
  misc_feature (734)..(734): n is a, c, g, or t
  misc_feature (738)..(738): n is a, c, g, or t
  misc_feature (748)..(748): n is a, c, g, or t
  misc_feature (756)..(756): n is a, c, g, or t
  misc_feature (759)..(760): n is a, c, g, or t
  misc_feature (770)..(770): n is a, c, g, or t
  misc_feature (778)..(778): n is a, c, g, or t
  misc_feature (783)..(783): n is a, c, g, or t
  misc_feature (787)..(787): n is a, c, g, or t
  misc_feature (791)..(792): n is a, c, g, or t
  misc_feature (795)..(795): n is a, c, g, or t
  misc_feature (804)..(804): n is a, c, g, or t
  misc_feature (811)..(811): n is a, c, g, or t
  misc_feature (815)..(815): n is a, c, g, or t
  misc_feature (821)..(821): n is a, c, g, or t
  misc_feature (825)..(825): n is a, c, g, or t
  misc_feature (838)..(838): n is a, c, g, or t
  misc_feature (844)..(845): n is a, c, g, or t
  misc_feature (850)..(850): n is a, c, g, or t
  misc_feature (870)..(870): n is a, c, g, or t
  misc_feature (873)..(874): n is a, c, g, or t
  misc_feature (877)..(877): n is a, c, g, or t
  misc_feature (890)..(890): n is a, c, g, or t
  misc_feature (893)..(896): n is a, c, g, or t
  misc_feature (905)..(906): n is a, c, g, or t
  misc_feature (909)..(909): n is a, c, g, or t
  misc_feature (911)..(911): n is a, c, g, or t
  misc_feature (921)..(921): n is a, c, g, or t
  misc_feature (925)..(925): n is a, c, g, or t
  misc_feature (929)..(929): n is a, c, g, or t
  misc_feature (931)..(931): n is a, c, g, or t
  misc_feature (933)..(933): n is a, c, g, or t
  misc_feature (942)..(942): n is a, c, g, or t
  misc_feature (944)..(944): n is a, c, g, or t
  misc_feature (948)..(948): n is a, c, g, or t
  misc_feature (950)..(950): n is a, c, g, or t
  misc_feature (952)..(955): n is a, c, g, or t
  misc_feature (957)..(957): n is a, c, g, or t
  misc_feature (966)..(966): n is a, c, g, or t
  misc_feature (979)..(979): n is a, c, g, or t
  misc_feature (986)..(986): n is a, c, g, or t
  misc_feature (1002)..(1002): n is a, c, g, or t
  misc_feature (1008)..(1008): n is a, c, g, or t
  misc_feature (1015)..(1015): n is a, c, g, or t
  misc_feature (1021)..(1021): n is a, c, g, or t
  misc_feature (1026)..(1026): n is a, c, g, or t
  misc_feature (1035)..(1035): n is a, c, g, or t
  misc_feature (1039)..(1041): n is a, c, g, or t
  misc_feature (1045)..(1045): n is a, c, g, or t
  misc_feature (1054)..(1055): n is a, c, g, or t
  misc_feature (1057)..(1057): n is a, c, g, or t
  misc_feature (1061)..(1061): n is a, c, g, or t
  misc_feature (1069)..(1069): n is a, c, g, or t
  misc_feature (1076)..(1076): n is a, c, g, or t
  misc_feature (1082)..(1082): n is a, c, g, or t
  misc_feature (1097)..(1097): n is a, c, g, or t
  misc_feature (1102)..(1102): n is a, c, g, or t
  misc_feature (1107)..(1107): n is a, c, g, or t
  misc_feature (1109)..(1110): n is a, c, g, or t
  misc_feature (1112)..(1115): n is a, c, g, or t
  misc_feature (1127)..(1127): n is a, c, g, or t
  misc_feature (1131)..(1131): n is a, c, g, or t
  misc_feature (1140)..(1140): n is a, c, g, or t
  misc_feature (1144)..(1145): n is a, c, g, or t
  misc_feature (1148)..(1148): n is a, c, g, or t
  misc_feature (1154)..(1154): n is a, c, g, or t
  misc_feature (1156)..(1156): n is a, c, g, or t
  misc_feature (1159)..(1159): n is a, c, g, or t
  misc_feature (1166)..(1166): n is a, c, g, or t
  misc_feature (1169)..(1171): n is a, c, g, or t
  misc_feature (1186)..(1186): n is a, c, g, or t
  misc_feature (1196)..(1196): n is a, c, g, or t
  misc_feature (1198)..(1198): n is a, c, g, or t
  misc_feature (1205)..(1205): n is a, c, g, or t
  misc_feature (1207)..(1207): n is a, c, g, or t
  misc_feature (1211)..(1211): n is a, c, g, or t
  misc_feature (1232)..(1232): n is a, c, g, or t
  misc_feature (1236)..(1237): n is a, c, g, or t
  misc_feature (1240)..(1240): n is a, c, g, or t
  misc_feature (1242)..(1243): n is a, c, g, or t
  misc_feature (1248)..(1248): n is a, c, g, or t
  misc_feature (1257)..(1257): n is a, c, g, or t
  misc_feature (1264)..(1264): n is a, c, g, or t
  misc_feature (1270)..(1270): n is a, c, g, or t
  misc_feature (1286)..(1286): n is a, c, g, or t
  misc_feature (1295)..(1295): n is a, c, g, or t
  misc_feature (1305)..(1306): n is a, c, g, or t
  misc_feature (1311)..(1312): n is a, c, g, or t
  misc_feature (1316)..(1316): n is a, c, g, or t
  misc_feature (1328)..(1329): n is a, c, g, or t
  misc_feature (1335)..(1335): n is a, c, g, or t
  misc_feature (1338)..(1338): n is a, c, g, or t
  misc_feature (1342)..(1342): n is a, c, g, or t
  misc_feature (1349)..(1349): n is a, c, g, or t
  misc_feature (1354)..(1355): n is a, c, g, or t
  misc_feature (1358)..(1358): n is a, c, g, or t
  misc_feature (1368)..(1369): n is a, c, g, or t
  misc_feature (1378)..(1379): n is a, c, g, or t
  misc_feature (1389)..(1390): n is a, c, g, or t
  misc_feature (1399)..(1399): n is a, c, g, or t
  misc_feature (1404)..(1404): n is a, c, g, or t
  misc_feature (1409)..(1409): n is a, c, g, or t
  misc_feature (1412)..(1412): n is a, c, g, or t
  misc_feature (1414)..(1414): n is a, c, g, or t
  misc_feature (1416)..(1417): n is a, c, g, or t
  misc_feature (1421)..(1421): n is a, c, g, or t
  misc_feature (1424)..(1424): n is a, c, g, or t
  misc_feature (1435)..(1435): n is a, c, g, or t
  misc_feature (1438)..(1439): n is a, c, g, or t
  misc_feature (1444)..(1444): n is a, c, g, or t
  misc_feature (1451)..(1451): n is a, c, g, or t
  misc_feature (1461)..(1461): n is a, c, g, or t
  misc_feature (1463)..(1463): n is a, c, g, or t
  misc_feature (1471)..(1471): n is a, c, g, or t
  misc_feature (1475)..(1477): n is a, c, g, or t
agagagantaactatgagaggatcgcatcaccatcaccatcacggatcctatttaggtgacactatagaatcgtcgacccacgcgtccgggggggtgccaccnaggtctgccccagatcacgtttgccaccggcagccaaccagttgggcccgagtccgcgggcaanaagcgattgggggcgcgtgagctcggctccccggtcccccgtccgggtgcccccccgccgggcccgaagcgatatatcctgccctccccggccacctcccccgcgtggaagcggagcggcggcctcgctgtaacgcagaancnaaatgtagcgagccgggtgtcgcggctggacgctcgccttggctgggggtgtgggggggcacgccgggggccaaggaggactgtcgaggaggagtgatgagaanagggggtgccctgcaccccccgagaccacgggccacgctgccacttgccaggcgccccccttcctcccangcgangggnaggtgttccacactgattctcntgactttaaggaccanggatttnaanaggtattagctcttccnaanaagggaggaantttttgnnaananantggaaaganggcagactcttnntctnggaccagcaatancctgaanatctgtggtnaatctnanacnagnccanccntaaagnncgtgnaanggagcccncancccccangcttggcnctntnttcntgaaatattttgaantnaanctgnttttttacanaaaaaggnccnntttcacaatngccacccncaaantttngttnnaanctcttctantctggangccncccttncctntgaaggaacctgnccaatnnataancttattaagataataaggancgnnttnttttttttttttnaannnnaaaatcttnntgngnttttgaaatncaantaantntntaacccctnanagantntnnnngnagtaaaaantatttgtgttttnttctccnaatttttcctatcttntttttntttatanggcttnccctntttgttctnaatnnnattntttacaatnntntggnaaaaaaanaaaaacncttganaaaatatttcctccnatctnctaantnntnnnnttaactccaatntaanatttttttncttnnctntaaaanancanaaaaaanttnnnaaaaagaagaaaaanctctcccttncnctttctnantttnttgttctcttttataaaatcnaagnnttntnnacaantaaagttangcactcntattcnccttttcttaaagtcnaaaataagnttattttganntaaannttantttcaaatcctnntaaacngancatnatttcanatacnntgnttttattaanntttttatanntttaataatnnatataatanttttntaacngtntntnnctcntanaaaaaactttnttnntctantctattnttttaatgtntntatatttncctnnntaa

SEQ ID NO: 995 - DNA, 1426 bp, Homo Sapiens
  misc_feature (2)..(2): n is a, c, g, or t
  misc_feature (4)..(5): n is a, c, g, or t
  misc_feature (11)..(11): n is a, c, g, or t
  misc_feature (683)..(683): n is a, c, g, or t
  misc_feature (687)..(687): n is a, c, g, or t
  misc_feature (693)..(693): n is a, c, g, or t
  misc_feature (720)..(720): n is a, c, g, or t
  misc_feature (724)..(724): n is a, c, g, or t
  misc_feature (738)..(738): n is a, c, g, or t
  misc_feature (747)..(747): n is a, c, g, or t
  misc_feature (768)..(768): n is a, c, g, or t
  misc_feature (770)..(770): n is a, c, g, or t
  misc_feature (772)..(772): n is a, c, g, or t
  misc_feature (776)..(776): n is a, c, g, or t
  misc_feature (781)..(781): n is a, c, g, or t
  misc_feature (804)..(804): n is a, c, g, or t
  misc_feature (808)..(809): n is a, c, g, or t
  misc_feature (811)..(811): n is a, c, g, or t
  misc_feature (813)..(814): n is a, c, g, or t
  misc_feature (816)..(816): n is a, c, g, or t
  misc_feature (820)..(820): n is a, c, g, or t
  misc_feature (824)..(824): n is a, c, g, or t
  misc_feature (836)..(836): n is a, c, g, or t
  misc_feature (848)..(848): n is a, c, g, or t
  misc_feature (853)..(855): n is a, c, g, or t
  misc_feature (863)..(863): n is a, c, g, or t
  misc_feature (875)..(875): n is a, c, g, or t
  misc_feature (879)..(880): n is a, c, g, or t
  misc_feature (886)..(886): n is a, c, g, or t
  misc_feature (896)..(896): n is a, c, g, or t
  misc_feature (899)..(899): n is a, c, g, or t
  misc_feature (902)..(902): n is a, c, g, or t
  misc_feature (907)..(907): n is a, c, g, or t
  misc_feature (911)..(911): n is a, c, g, or t
  misc_feature (914)..(915): n is a, c, g, or t
  misc_feature (919)..(919): n is a, c, g, or t
  misc_feature (933)..(933): n is a, c, g, or t
  misc_feature (938)..(938): n is a, c, g, or t
  misc_feature (942)..(942): n is a, c, g, or t
  misc_feature (946)..(946): n is a, c, g, or t
  misc_feature (951)..(952): n is a, c, g, or t
  misc_feature (954)..(955): n is a, c, g, or t
  misc_feature (960)..(961): n is a, c, g, or t
  misc_feature (965)..(965): n is a, c, g, or t
  misc_feature (969)..(969): n is a, c, g, or t
  misc_feature (980)..(980): n is a, c, g, or t
  misc_feature (984)..(984): n is a, c, g, or t
  misc_feature (987)..(987): n is a, c, g, or t
  misc_feature (1002)..(1005): n is a, c, g, or t
  misc_feature (1007)..(1011): n is a, c, g, or t
  misc_feature (1014)..(1014): n is a, c, g, or t
  misc_feature (1018)..(1018): n is a, c, g, or t
  misc_feature (1022)..(1023): n is a, c, g, or t
  misc_feature (1026)..(1027): n is a, c, g, or t
  misc_feature (1030)..(1031): n is a, c, g, or t
  misc_feature (1036)..(1036): n is a, c, g, or t
  misc_feature (1043)..(1043): n is a, c, g, or t
  misc_feature (1045)..(1045): n is a, c, g, or t
  misc_feature (1049)..(1051): n is a, c, g, or t
  misc_feature (1058)..(1058): n is a, c, g, or t
  misc_feature (1062)..(1063): n is a, c, g, or t
  misc_feature (1066)..(1066): n is a, c, g, or t
  misc_feature (1076)..(1076): n is a, c, g, or t
  misc_feature (1088)..(1091): n is a, c, g, or t
  misc_feature (1093)..(1093): n is a, c, g, or t
  misc_feature (1104)..(1105): n is a, c, g, or t
  misc_feature (1110)..(1110): n is a, c, g, or t
  misc_feature (1114)..(1114): n is a, c, g, or t
  misc_feature (1116)..(1116): n is a, c, g, or t
  misc_feature (1119)..(1119): n is a, c, g, or t
  misc_feature (1127)..(1127): n is a, c, g, or t
  misc_feature (1134)..(1134): n is a, c, g, or t
  misc_feature (1137)..(1138): n is a, c, g, or t
  misc_feature (1141)..(1141): n is a, c, g, or t
  misc_feature (1146)..(1147): n is a, c, g, or t
  misc_feature (1151)..(1151): n is a, c, g, or t
  misc_feature (1156)..(1156): n is a, c, g, or t
  misc_feature (1158)..(1158): n is a, c, g, or t
  misc_feature (1162)..(1162): n is a, c, g, or t
  misc_feature (1164)..(1164): n is a, c, g, or t
  misc_feature (1166)..(1170): n is a, c, g, or t
  misc_feature (1172)..(1172): n is a, c, g, or t
  misc_feature (1178)..(1178): n is a, c, g, or t
  misc_feature (1180)..(1180): n is a, c, g, or t
  misc_feature (1182)..(1182): n is a, c, g, or t
  misc_feature (1184)..(1184): n is a, c, g, or t
  misc_feature (1186)..(1186): n is a, c, g, or t
  misc_feature (1189)..(1189): n is a, c, g, or t
  misc_feature (1200)..(1200): n is a, c, g, or t
  misc_feature (1210)..(1210): n is a, c, g, or t
  misc_feature (1212)..(1212): n is a, c, g, or t
  misc_feature (1214)..(1215): n is a, c, g, or t
  misc_feature (1217)..(1218): n is a, c, g, or t
  misc_feature (1221)..(1222): n is a, c, g, or t
  misc_feature (1226)..(1226): n is a, c, g, or t
  misc_feature (1230)..(1230): n is a, c, g, or t
  misc_feature (1232)..(1232): n is a, c, g, or t
  misc_feature (1243)..(1243): n is a, c, g, or t
  misc_feature (1246)..(1248): n is a, c, g, or t
  misc_feature (1250)..(1250): n is a, c, g, or t
  misc_feature (1254)..(1254): n is a, c, g, or t
  misc_feature (1256)..(1258): n is a, c, g, or t
  misc_feature (1261)..(1261): n is a, c, g, or t
  misc_feature (1268)..(1268): n is a, c, g, or t
  misc_feature (1270)..(1270): n is a, c, g, or t
  misc_feature (1272)..(1272): n is a, c, g, or t
  misc_feature (1276)..(1276): n is a, c, g, or t
  misc_feature (1278)..(1279): n is a, c, g, or t
  misc_feature (1285)..(1285): n is a, c, g, or t
  misc_feature (1294)..(1294): n is a, c, g, or t
  misc_feature (1302)..(1302): n is a, c, g, or t
  misc_feature (1304)..(1305): n is a, c, g, or t
  misc_feature (1307)..(1307): n is a, c, g, or t
  misc_feature (1312)..(1313): n is a, c, g, or t
  misc_feature (1316)..(1316): n is a, c, g, or t
  misc_feature (1318)..(1318): n is a, c, g, or t
  misc_feature (1329)..(1329): n is a, c, g, or t
  misc_feature (1331)..(1331): n is a, c, g, or t
  misc_feature (1333)..(1333): n is a, c, g, or t
  misc_feature (1338)..(1339): n is a, c, g, or t
  misc_feature (1344)..(1344): n is a, c, g, or t
  misc_feature (1347)..(1347): n is a, c, g, or t
  misc_feature (1352)..(1352): n is a, c, g, or t
  misc_feature (1360)..(1360): n is a, c, g, or t
  misc_feature (1363)..(1363): n is a, c, g, or t
  misc_feature (1366)..(1367): n is a, c, g, or t
  misc_feature (1386)..(1386): n is a, c, g, or t
  misc_feature (1388)..(1389): n is a, c, g, or t
  misc_feature (1395)..(1395): n is a, c, g, or t
  misc_feature (1397)..(1397): n is a, c, g, or t
  misc_feature (1403)..(1403): n is a, c, g, or t
  misc_feature (1408)..(1409): n is a, c, g, or t
  misc_feature (1420)..(1420): n is a, c, g, or t
  misc_feature (1425)..(1425): n is a, c, g, or t
gnannagaganattactatgagaggatcgcatcaccatcaccatcacggatcctatttaggtgacactatagaatcgtcgacccacgcgtccgccgagcccggcgggaccatgtttcaccagcaccggctccagtgggctctacaaggcgcctctgtcgaagagccttctgctggtccccagtgccctctccctcctgctcgccctcctcctgcctcactgccagaagctctttgtgtatgaccttcacgcagtcaagaacgacttccagatttggaggttgatatgtggaagaataatttgccttgatttgaaagatactttctgcagtagtctgcttatttataattttaggatatttgaaagaagatatggaagcagaaaatttgcatcctttttgctgggttcctgggttttgtcagccttatttgactttctcctcattgaagctatgcagtatttctttggcatcactgcagctagtaatttgccttctggattcctggcacctgtgtttgctctgtttgtaccattttactgctccataccaagagtccaagtggcacaaattctgggtccgttgtccatcacaaaacaagacattgatttatatattgggactgcagcttttcacctctggttcctacatctggattgtaagccataagtggacttatgtccggnctgngctacnacagcaaaaatgttccaaggtgcatcnaggngcctctgcattccncagctggangggcaaaaattcttttcttgnanancttngaaanccatcttctctttcttcaaaaanccannancnnanccanaaantggtatgggaanccacccctgganatccnnngaaacaancaaaaaaatggnaacnngctggnaccgggaagnctnaanagttnctcncanntttngcacaaggggagcncaaanaganaacnaacanncnnggaannaaangaancaaattggaancctnccnttttccccccttaannnncnnnnnaanaaancgtnnatnntannggggncggttcngncaannnttaaaanccannaancatccccctnctaaaagagttnnnnanaaaaaaggacnnccccngctncnatngaaaaagngaatttnctnnaangaaanntcanaaaancncccnanannnnncnaaaaancncnananagngccccccaaanttccacgagncncnncnnaanncccncggncnaaaattggacntannngncccncnnntanaattgtntngnaccncnnccatcntacaatccnaaggaacnannantctanntantntatagtacttnantnacaanngatanaancaacnctacatcntcnatnncatcagcactaaaatgatnanntatgangngaaganatganncgaccatatanctatna

SEQ ID NO: 996 - DNA, 1434 bp, Homo Sapiens
  misc_feature (953)..(953): n is a, c, g, or t
  misc_feature (968)..(968): n is a, c, g, or t
  misc_feature (974)..(974): n is a, c, g, or t
  misc_feature (978)..(978): n is a, c, g, or t
  misc_feature (985)..(985): n is a, c, g, or t
  misc_feature (987)..(987): n is a, c, g, or t
  misc_feature (991)..(991): n is a, c, g, or t
  misc_feature (1001)..(1001): n is a, c, g, or t
  misc_feature (1022)..(1022): n is a, c, g, or t
  misc_feature (1026)..(1026): n is a, c, g, or t
  misc_feature (1035)..(1035): n is a, c, g, or t
  misc_feature (1038)..(1038): n is a, c, g, or t
  misc_feature (1040)..(1040): n is a, c, g, or t
  misc_feature (1043)..(1043): n is a, c, g, or t
  misc_feature (1053)..(1053): n is a, c, g, or t
  misc_feature (1068)..(1068): n is a, c, g, or t
  misc_feature (1082)..(1082): n is a, c, g, or t
  misc_feature (1084)..(1084): n is a, c, g, or t
  misc_feature (1088)..(1088): n is a, c, g, or t
  misc_feature (1093)..(1093): n is a, c, g, or t
  misc_feature (1114)..(1114): n is a, c, g, or t
  misc_feature (1118)..(1118): n is a, c, g, or t
  misc_feature (1123)..(1123): n is a, c, g, or t
  misc_feature (1128)..(1129): n is a, c, g, or t
  misc_feature (1133)..(1133): n is a, c, g, or t
  misc_feature (1150)..(1150): n is a, c, g, or t
  misc_feature (1155)..(1155): n is a, c, g, or t
  misc_feature (1159)..(1159): n is a, c, g, or t
  misc_feature (1167)..(1167): n is a, c, g, or t
  misc_feature (1182)..(1182): n is a, c, g, or t
  misc_feature (1184)..(1184): n is a, c, g, or t
  misc_feature (1186)..(1186): n is a, c, g, or t
  misc_feature (1201)..(1201): n is a, c, g, or t
  misc_feature (1209)..(1209): n is a, c, g, or t
  misc_feature (1211)..(1211): n is a, c, g, or t
  misc_feature (1225)..(1225): n is a, c, g, or t
  misc_feature (1228)..(1228): n is a, c, g, or t
  misc_feature (1235)..(1236): n is a, c, g, or t
  misc_feature (1238)..(1238): n is a, c, g, or t
  misc_feature (1244)..(1244): n is a, c, g, or t
  misc_feature (1268)..(1268): n is a, c, g, or t
  misc_feature (1270)..(1270): n is a, c, g, or t
  misc_feature (1275)..(1275): n is a, c, g, or t
  misc_feature (1284)..(1284): n is a, c, g, or t
  misc_feature (1287)..(1288): n is a, c, g, or t
  misc_feature (1293)..(1293): n is a, c, g, or t
  misc_feature (1297)..(1297): n is a, c, g, or t
  misc_feature (1299)..(1299): n is a, c, g, or t
  misc_feature (1316)..(1316): n is a, c, g, or t
  misc_feature (1323)..(1323): n is a, c, g, or t
  misc_feature (1326)..(1326): n is a, c, g, or t
  misc_feature (1333)..(1333): n is a, c, g, or t
  misc_feature (1385)..(1385): n is a, c, g, or t
  misc_feature (1387)..(1387): n is a, c, g, or t
  misc_feature (1407)..(1407): n is a, c, g, or t
  misc_feature (1413)..(1413): n is a, c, g, or t
  misc_feature (1422)..(1422): n is a, c, g, or t
tagagagattactatgagaggatcgcatcaccatcaccatcacggatcctatttaggtgacactatagaatcgtcgacccacgcgtccgcaacccagaaatcccccgtgcagcctgtagaggacctagctgggaacttatgggagaagttacgtgaaaaaatcaggtcttttgtggcatattctatcgcaatcgatgagatcacggatataaataataccacccagttggccatattcatccgtggtgtcgatgagaatttcgatgtgtccgaagaacttctggacacggtgcccatgacgggtacaaaatctggcaacgagatctttttgcgtgttgagaagagcctgaaaaagttctgtatcaactggtcgagattagtaagcgtggcctccactggcaccccagcgatggtggatgccaataacgggcttgtcacaaaactgaagtccagggtggcgacgttctgcaagggtgcggaactgaagtccatctgttgtataattcatccggaatcactctgtgctcagaagttgaagatggaccacgtcatggacgtggtagtgaagtccgtgaactggatatgctcccggggactgaaccacagcgagttcacaaccttgctctatgagctggacagccagtatggtagcctcctgtactacacggagattaagtggctcagtcgcgggctcgtgctaaagagatttttcgaatccttggaagaaatcgactccttcatgtcatccagagggaaacccctgcctcaactgagctccatagattggatccgagacctggccttcttggttgacatgacgatgcatctgaacgctttgaacatctctctccaaggacactcccaaatcgtcccgcaaatgtatgacctgatccgggcgttcctagcaaaactgtgcctctgggaaactcatttgacgaaggaataatcctggncccactttccccccntgaaanttgnttttccnanaaangaaaagcgangggcctgaacctaaattcccnaaantcgcggaantcnanacngaaattccanaaaaaggcctgtctnaatttcaaactctncnaaancgaantgacttctgttcccccccccntttnccccnaaaanncaanagtgggcccaaaaaccnccaantggnggtttccnccgccaatgcacccngncngaaaaacaaaacaanaagggggnanacaaattccaaatnccntgggganncncccaanaaaacccttgccaaaatttttcgntnggaancccttttgnaanntgttncctntnaaagaaaaaaaaatgcncccttangtnccggggnttctccccccccggggaaaaacctcggccctggggaggggcctttcccgggngnaaaaattttttttaaaaccnccccgnaggggctcnttcccccttaac

SEQ ID NO: 997 - DNA, 1403 bp, Homo Sapiens
  misc_feature (718)..(720): n is a, c, g, or t
  misc_feature (722)..(722): n is a, c, g, or t
  misc_feature (724)..(724): n is a, c, g, or t
  misc_feature (726)..(778): n is a, c, g, or t
  misc_feature (783)..(783): n is a, c, g, or t
  misc_feature (788)..(788): n is a, c, g, or t
  misc_feature (794)..(794): n is a, c, g, or t
  misc_feature (797)..(800): n is a, c, g, or t
  misc_feature (803)..(804): n is a, c, g, or t
  misc_feature (806)..(807): n is a, c, g, or t
  misc_feature (813)..(814): n is a, c, g, or t
  misc_feature (816)..(816): n is a, c, g, or t
  misc_feature (819)..(819): n is a, c, g, or t
  misc_feature (822)..(826): n is a, c, g, or t
  misc_feature (828)..(828): n is a, c, g, or t
  misc_feature (835)..(835): n is a, c, g, or t
  misc_feature (839)..(840): n is a, c, g, or t
  misc_feature (843)..(843): n is a, c, g, or t
  misc_feature (851)..(852): n is a, c, g, or t
  misc_feature (854)..(856): n is a, c, g, or t
  misc_feature (859)..(859): n is a, c, g, or t
  misc_feature (861)..(862): n is a, c, g, or t
  misc_feature (864)..(868): n is a, c, g, or t
  misc_feature (871)..(872): n is a, c, g, or t
  misc_feature (875)..(878): n is a, c, g, or t
  misc_feature (881)..(881): n is a, c, g, or t
  misc_feature (888)..(890): n is a, c, g, or t
  misc_feature (893)..(893): n is a, c, g, or t
  misc_feature (896)..(896): n is a, c, g, or t
  misc_feature (898)..(900): n is a, c, g, or t
  misc_feature (904)..(904): n is a, c, g, or t
  misc_feature (907)..(907): n is a, c, g, or t
  misc_feature (909)..(909): n is a, c, g, or t
  misc_feature (913)..(915): n is a, c, g, or t
  misc_feature (921)..(921): n is a, c, g, or t
  misc_feature (925)..(925): n is a, c, g, or t
  misc_feature (928)..(929): n is a, c, g, or t
  misc_feature (934)..(934): n is a, c, g, or t
  misc_feature (939)..(940): n is a, c, g, or t
  misc_feature (943)..(947): n is a, c, g, or t
  misc_feature (949)..(951): n is a, c, g, or t
  misc_feature (955)..(955): n is a, c, g, or t
  misc_feature (959)..(961): n is a, c, g, or t
  misc_feature (964)..(966): n is a, c, g, or t
  misc_feature (969)..(970): n is a, c, g, or t
  misc_feature (973)..(976): n is a, c, g, or t
  misc_feature (980)..(980): n is a, c, g, or t
  misc_feature (992)..(992): n is a, c, g, or t
  misc_feature (994)..(996): n is a, c, g, or t
  misc_feature (999)..(999): n is a, c, g, or t
  misc_feature (1003)..(1003): n is a, c, g, or t
  misc_feature (1007)..(1008): n is a, c, g, or t
  misc_feature (1010)..(1011): n is a, c, g, or t
  misc_feature (1013)..(1014): n is a, c, g, or t
  misc_feature (1018)..(1019): n is a, c, g, or t
  misc_feature (1021)..(1021): n is a, c, g, or t
  misc_feature (1024)..(1024): n is a, c, g, or t
  misc_feature (1027)..(1027): n is a, c, g, or t
  misc_feature (1030)..(1036): n is a, c, g, or t
  misc_feature (1045)..(1046): n is a, c, g, or t
  misc_feature (1051)..(1052): n is a, c, g, or t
  misc_feature (1055)..(1057): n is a, c, g, or t
  misc_feature (1061)..(1067): n is a, c, g, or t
  misc_feature (1069)..(1073): n is a, c, g, or t
  misc_feature (1076)..(1076): n is a, c, g, or t
  misc_feature (1078)..(1082): n is a, c, g, or t
  misc_feature (1085)..(1089): n is a, c, g, or t
  misc_feature (1092)..(1100): n is a, c, g, or t
  misc_feature (1102)..(1103): n is a, c, g, or t
  misc_feature (1109)..(1114): n is a, c, g, or t
  misc_feature (1120)..(1120): n is a, c, g, or t
  misc_feature (1127)..(1128): n is a, c, g, or t
  misc_feature (1140)..(1147): n is a, c, g, or t
  misc_feature (1152)..(1158): n is a, c, g, or t
  misc_feature (1164)..(1168): n is a, c, g, or t
  misc_feature (1170)..(1174): n is a, c, g, or t
  misc_feature (1176)..(1181): n is a, c, g, or t
  misc_feature (1186)..(1195): n is a, c, g, or t
  misc_feature (1198)..(1198): n is a, c, g, or t
  misc_feature (1200)..(1223): n is a, c, g, or t
  misc_feature (1225)..(1243): n is a, c, g, or t
  misc_feature (1245)..(1245): n is a, c, g, or t
  misc_feature (1248)..(1256): n is a, c, g, or t
  misc_feature (1259)..(1265): n is a, c, g, or t
  misc_feature (1267)..(1276): n is a, c, g, or t
  misc_feature (1278)..(1291): n is a, c, g, or t
  misc_feature (1293)..(1293): n is a, c, g, or t
  misc_feature (1295)..(1310): n is a, c, g, or t
  misc_feature (1312)..(1316): n is a, c, g, or t
  misc_feature (1320)..(1339): n is a, c, g, or t
  misc_feature (1342)..(1366): n is a, c, g, or t
  misc_feature (1368)..(1370): n is a, c, g, or t
  misc_feature (1374)..(1401): n is a, c, g, or t
  misc_feature (1403)..(1403): n is a, c, g, or t
tagagaaattactatgagaggatcgcatcaccatcaccatcacggatcctatttaggtgacactatagaatcgtcgacccacgcgtccgctggtcctctgcctgggcttcgaggttccttgggggcagcggctcatgctggttttcccactgcagtgtcttctgtggcttcagcgtcacctagtgcaggctgccattcaacaaacgcattgtcaacagtcaaccaaaagaaacccattggccaccataccctgaggactaaccctgacacagatgcccttccagatgccctcaatagtctaactgattccatcgccccagccttgggggagaagcactgctgcctatgcactccatttacagggttatagagtggaaagtcccacaatctttttcttctctattttcagaaaaacgttgacctcttggcgagaatgcaaagaagggaacgcttgcttatacactgttggtgaactgtcacccctacaactcagcttgcaaccagccctggccaccagtttccccacactgagctgaatatcggacatgcccatcttagacattccagcccattctgaaattccacatcgattcacctgacaaagtctgaagttccagggcaatttatctggaaaagcttacctggaatcacgtgtcatttcaaccaacaactgttgaagaggacgtggcattaaaaccaagggtatcaattatttatnnnananannnnnnnnnnnnnnnnnnnnnnnnnnnnnnnnnnnnnnnnnnnnnnnnnnnnnagggnggccncccccnaannnnganncnnattaanntnaantannnnnancttggancccnngtngaaaaatnnannnaangnncnnnnnaannccnnnnggnatttttnnnaangcncnnntttnccncngggnnntttttnaatnggnnaaaanccaannttnnnnngnnnaaantttnnngannnaannaannnnaaanggaaaaaaaaancnnnggnaaanaacnncnngnnaaannanccnaanggnnnnnnnaaaaaaaannttttnnggnnntttnnnnnnntnnnnnaangnnnnnaannnnnaannnnnnnnntnnaaattnnnnnntttttnaaaaacnnaaaaaaaaaaannnnnnnntttannnnnnntttttnnnnntnnnnncnnnnnnaaaannnnnnnnnnaantnnnnnnnnnnnnnnnnnnnnnnnngnnnnnnnnnnnnnnnnnnncnttnnnnnnnnnttnnnnnnnannnnnnnnnntnnnnnnnnnnnnnnanannnnnnnnnnnnnnnntnnnnnaaannnnnnnnnnnnnnnnnnnnaannnnnnnnnnnnnnnnnnnnnnnnnannntttnnnnnnnnnnnnnnnnnnnnnnnnnnnnan

SEQ ID NO: 998 - DNA, 1386 bp, Homo Sapiens
  misc_feature (585)..(585): n is a, c, g, or t
  misc_feature (856)..(856): n is a, c, g, or t
  misc_feature (865)..(865): n is a, c, g, or t
  misc_feature (904)..(904): n is a, c, g, or t
  misc_feature (917)..(917): n is a, c, g, or t
  misc_feature (927)..(927): n is a, c, g, or t
  misc_feature (930)..(930): n is a, c, g, or t
  misc_feature (935)..(935): n is a, c, g, or t
  misc_feature (940)..(940): n is a, c, g, or t
  misc_feature (946)..(946): n is a, c, g, or t
  misc_feature (948)..(948): n is a, c, g, or t
  misc_feature (956)..(956): n is a, c, g, or t
  misc_feature (967)..(967): n is a, c, g, or t
  misc_feature (981)..(981): n is a, c, g, or t
  misc_feature (991)..(991): n is a, c, g, or t
  misc_feature (997)..(997): n is a, c, g, or t
  misc_feature (1003)..(1003): n is a, c, g, or t
  misc_feature (1005)..(1005): n is a, c, g, or t
  misc_feature (1011)..(1011): n is a, c, g, or t
  misc_feature (1020)..(1020): n is a, c, g, or t
  misc_feature (1026)..(1026): n is a, c, g, or t
  misc_feature (1033)..(1033): n is a, c, g, or t
  misc_feature (1036)..(1036): n is a, c, g, or t
  misc_feature (1041)..(1041): n is a, c, g, or t
  misc_feature (1048)..(1048): n is a, c, g, or t
  misc_feature (1071)..(1071): n is a, c, g, or t
  misc_feature (1077)..(1077): n is a, c, g, or t
  misc_feature (1085)..(1085): n is a, c, g, or t
  misc_feature (1087)..(1087): n is a, c, g, or t
  misc_feature (1095)..(1095): n is a, c, g, or t
  misc_feature (1098)..(1098): n is a, c, g, or t
  misc_feature (1103)..(1103): n is a, c, g, or t
  misc_feature (1107)..(1107): n is a, c, g, or t
  misc_feature (1121)..(1121): n is a, c, g, or t
  misc_feature (1129)..(1129): n is a, c, g, or t
  misc_feature (1140)..(1141): n is a, c, g, or t
  misc_feature (1147)..(1147): n is a, c, g, or t
  misc_feature (1150)..(1150): n is a, c, g, or t
  misc_feature (1158)..(1158): n is a, c, g, or t
  misc_feature (1166)..(1166): n is a, c, g, or t
  misc_feature (1177)..(1177): n is a, c, g, or t
  misc_feature (1182)..(1182): n is a, c, g, or t
  misc_feature (1185)..(1185): n is a, c, g, or t
  misc_feature (1192)..(1192): n is a, c, g, or t
  misc_feature (1194)..(1195): n is a, c, g, or t
  misc_feature (1197)..(1197): n is a, c, g, or t
  misc_feature (1201)..(1201): n is a, c, g, or t
  misc_feature (1204)..(1204): n is a, c, g, or t
  misc_feature (1210)..(1210): n is a, c, g, or t
  misc_feature (1213)..(1213): n is a, c, g, or t
  misc_feature (1216)..(1216): n is a, c, g, or t
  misc_feature (1220)..(1220): n is a, c, g, or t
  misc_feature (1224)..(1224): n is a, c, g, or t
  misc_feature (1226)..(1226): n is a, c, g, or t
  misc_feature (1228)..(1228): n is a, c, g, or t
  misc_feature (1233)..(1233): n is a, c, g, or t
  misc_feature (1235)..(1235): n is a, c, g, or t
  misc_feature (1246)..(1248): n is a, c, g, or t
  misc_feature (1252)..(1252): n is a, c, g, or t
  misc_feature (1257)..(1259): n is a, c, g, or t
  misc_feature (1267)..(1267): n is a, c, g, or t
  misc_feature (1270)..(1270): n is a, c, g, or t
  misc_feature (1274)..(1274): n is a, c, g, or t
  misc_feature (1278)..(1279): n is a, c, g, or t
  misc_feature (1287)..(1287): n is a, c, g, or t
  misc_feature (1291)..(1291): n is a, c, g, or t
  misc_feature (1294)..(1294): n is a, c, g, or t
  misc_feature (1299)..(1299): n is a, c, g, or t
  misc_feature (1302)..(1302): n is a, c, g, or t
  misc_feature (1315)..(1315): n is a, c, g, or t
  misc_feature (1327)..(1327): n is a, c, g, or t
  misc_feature (1340)..(1340): n is a, c, g, or t
  misc_feature (1349)..(1349): n is a, c, g, or t
  misc_feature (1361)..(1361): n is a, c, g, or t
  misc_feature (1366)..(1366): n is a, c, g, or t
  misc_feature (1370)..(1371): n is a, c, g, or t
  misc_feature (1381)..(1381): n is a, c, g, or t
atagagaaattactatgagaggatcgcatcaccatcaccatcacggatcctatttaggtgacactatagaatcgtcgacccacgcgtccggggtgcttgacaaatctttgttggtaatgagcaaaaaaggggattctgtgcccaataccatgaaatcaatgcacagaagattcagtcaatcaagaaaggtgcacagacactggccacacacactgacatttgtttgcagatgttccagtccccctgacttccaccaatccattcattcattccacaagcatttttgctggggtggaagcagggccatacagggtgtgtacatcacagatagggtgggtttgtataatgagtataaaaaacttctagcagaagatgacaaagtatatcaagaaagggctctcttcgaaatcacaccactgcactccagcctgggtaacagagggagattccatctaaaaaaaaaaaaaaaaaaaaaaaaagggcggccgctccctatagtgagtcgtattaagcttaattagctgagcttggactcctgttgatagatccagtaatgacctcagaactccatctggatttgttcanaacgctcggttgccgccgggcgttttttattggtgagaatccaagctagcttggcgagattttcaggagctaaggaagctaaaatggagaaaaaaatcactggatataccaccgttgatatatcccaatggcatcgtaaagaacattttgaggcatttcagtcagttgctcaatgtacctataaccagaccgttcagctggatattacggcctttttaaagaccgtaaagaaaaataagcacaagttttatccggcctttattcacattcntgcccgccngaatgaatgctcatccggaatttcgtatggcaatgaaanacggtgagctggngatatggganagngttcnccctngttacncngttttccntgaccaactgnaaacgttttcctcnctctggaggnaaaccnccaacnanttccgncatttccancataantcccaanatnggggngttacgngaaaaccggcctatttccctaanggtttntggaaaantntttttccnccncccancccnggggaattccccantttgattnaacgggccaannggaaanttnttcccccnttttcccngggcaatttancccanggnaaagggncnnancccnggnatccgntcnccngccnttgnangnctccngnccccaaggctnnnaatnaaccnnnccgagagnggngggngggnnattttttnaggnatntgggnccnaacccgggggaancccctcttgggncaaaaaaaaaggncccaaaggncttttttttttngggancccnnaaaacccccnccccc

SEQ ID NO: 999 - DNA, 1380 bp, Homo Sapiens
  misc_feature (2)..(2): n is a, c, g, or t
  misc_feature (801)..(801): n is a, c, g, or t
  misc_feature (807)..(807): n is a, c, g, or t
  misc_feature (818)..(818): n is a, c, g, or t
  misc_feature (826)..(826): n is a, c, g, or t
  misc_feature (851)..(852): n is a, c, g, or t
  misc_feature (868)..(868): n is a, c, g, or t
  misc_feature (872)..(872): n is a, c, g, or t
  misc_feature (886)..(886): n is a, c, g, or t
  misc_feature (896)..(896): n is a, c, g, or t
  misc_feature (899)..(899): n is a, c, g, or t
  misc_feature (903)..(903): n is a, c, g, or t
  misc_feature (905)..(905): n is a, c, g, or t
  misc_feature (923)..(923): n is a, c, g, or t
  misc_feature (927)..(927): n is a, c, g, or t
  misc_feature (938)..(939): n is a, c, g, or t
  misc_feature (954)..(954): n is a, c, g, or t
  misc_feature (968)..(968): n is a, c, g, or t
  misc_feature (974)..(974): n is a, c, g, or t
  misc_feature (978)..(978): n is a, c, g, or t
  misc_feature (982)..(984): n is a, c, g, or t
  misc_feature (986)..(986): n is a, c, g, or t
  misc_feature (991)..(992): n is a, c, g, or t
  misc_feature (995)..(995): n is a, c, g, or t
  misc_feature (1001)..(1001): n is a, c, g, or t
  misc_feature (1006)..(1006): n is a, c, g, or t
  misc_feature (1017)..(1017): n is a, c, g, or t
  misc_feature (1026)..(1026): n is a, c, g, or t
  misc_feature (1034)..(1034): n is a, c, g, or t
  misc_feature (1036)..(1036): n is a, c, g, or t
  misc_feature (1044)..(1044): n is a, c, g, or t
  misc_feature (1047)..(1048): n is a, c, g, or t
  misc_feature (1058)..(1058): n is a, c, g, or t
  misc_feature (1067)..(1067): n is a, c, g, or t
  misc_feature (1070)..(1070): n is a, c, g, or t
  misc_feature (1073)..(1073): n is a, c, g, or t
  misc_feature (1077)..(1077): n is a, c, g, or t
  misc_feature (1079)..(1080): n is a, c, g, or t
  misc_feature (1083)..(1083): n is a, c, g, or t
  misc_feature (1091)..(1091): n is a, c, g, or t
  misc_feature (1093)..(1093): n is a, c, g, or t
  misc_feature (1110)..(1110): n is a, c, g, or t
  misc_feature (1113)..(1113): n is a, c, g, or t
  misc_feature (1116)..(1116): n is a, c, g, or t
  misc_feature (1129)..(1129): n is a, c, g, or t
  misc_feature (1132)..(1136): n is a, c, g, or t
  misc_feature (1142)..(1142): n is a, c, g, or t
  misc_feature (1145)..(1146): n is a, c, g, or t
  misc_feature (1148)..(1148): n is a, c, g, or t
  misc_feature (1150)..(1151): n is a, c, g, or t
  misc_feature (1153)..(1154): n is a, c, g, or t
  misc_feature (1175)..(1175): n is a, c, g, or t
  misc_feature (1179)..(1180): n is a, c, g, or t
  misc_feature (1182)..(1182): n is a, c, g, or t
  misc_feature (1184)..(1184): n is a, c, g, or t
  misc_feature (1186)..(1186): n is a, c, g, or t
  misc_feature (1189)..(1191): n is a, c, g, or t
  misc_feature (1194)..(1195): n is a, c, g, or t
  misc_feature (1198)..(1198): n is a, c, g, or t
  misc_feature (1200)..(1202): n is a, c, g, or t
  misc_feature (1210)..(1210): n is a, c, g, or t
  misc_feature (1215)..(1215): n is a, c, g, or t
  misc_feature (1217)..(1217): n is a, c, g, or t
  misc_feature (1221)..(1222): n is a, c, g, or t
  misc_feature (1225)..(1225): n is a, c, g, or t
  misc_feature (1227)..(1227): n is a, c, g, or t
  misc_feature (1231)..(1232): n is a, c, g, or t
  misc_feature (1252)..(1252): n is a, c, g, or t
  misc_feature (1257)..(1257): n is a, c, g, or t
  misc_feature (1264)..(1264): n is a, c, g, or t
  misc_feature (1267)..(1270): n is a, c, g, or t
  misc_feature (1272)..(1273): n is a, c, g, or t
  misc_feature (1276)..(1278): n is a, c, g, or t
  misc_feature (1280)..(1288): n is a, c, g, or t
  misc_feature (1291)..(1296): n is a, c, g, or t
  misc_feature (1299)..(1301): n is a, c, g, or t
  misc_feature (1304)..(1313): n is a, c, g, or t
  misc_feature (1315)..(1315): n is a, c, g, or t
  misc_feature (1329)..(1330): n is a, c, g, or t
  misc_feature (1333)..(1333): n is a, c, g, or t
  misc_feature (1336)..(1339): n is a, c, g, or t
  misc_feature (1341)..(1342): n is a, c, g, or t
  misc_feature (1344)..(1348): n is a, c, g, or t
  misc_feature (1353)..(1355): n is a, c, g, or t
  misc_feature (1357)..(1357): n is a, c, g, or t
  misc_feature (1359)..(1360): n is a, c, g, or t
  misc_feature (1367)..(1367): n is a, c, g, or t
  misc_feature (1370)..(1370): n is a, c, g, or t
  misc_feature (1373)..(1373): n is a, c, g, or t
  misc_feature (1375)..(1375): n is a, c, g, or t
  misc_feature (1377)..(1377): n is a, c, g, or t
cnaatagagagaattactatgagaggatcgcatcaccatcaccatcacggatcctatttaggtgacactatagaatcgtcgacccacgcgtccggctacttcttcttggacgacacggaccctgatagcatgaaggattttgagatcgtggaccagccgggcttggacatctttggacaggttttcaaccagtggaagagcaaggagtgtgtttgccccaattgcagtcgcagcattgccgcctcccgctttgctccccatctggagaagtgcctgggaatgggtcggaacagcagccgaatcgccaaccgccggattgccaatagcaacaatatgaataagtctgagagtgaccaagaagataatgatgacatcaatgacaacgactggtcctatggctcggagaagaaagccaagaagagaaagtcagacaagaaccccaattcccctcgaagatccaagtcattaaaacacaaaaatggggaacttagcaattcggatccttttaagtataacaattcaactgggatcagctatgagaccctggggccggaggagcttcgcagcctgctaaccacgcaatgtggggtgatttctgaacacaccaagaagatgtgcacaaggtccctgcgctgcccacagcacacagatgagcagaggcgaaccgtacggatttattttctcgggccctcggctgtccttccagaagtcgagagctccctggataatgacagctttgacatgactgacagccaggccctgatcagccggcttcagtgggacggctcctctgacctctcnccctcngaatcaggctncctccaanacgagtgaaaatcagggatggggtnnagggtacccacagctntgantcccggaaaccaanaaaaaaaatnccntctnancctggtagggaatgcccnccgnctaagtttcannaaaaaaaaaaaaccnaaagcccccggggncccccnaaancccnnnanttttnnatnaaatcnccttnacttgggggcnaagggaaancctttggntnaaaaaaanccnntttccctganccccccccnggnggnaaancnnggnaaaagaancncttctgggggtttgggnctnggnaaacttggggggnccnnnnngcaaanaanncnanntnncccccccgggggggggaaaancccnncnangngannnaannccncnnngggggaanccaancngaannttntnctgnnaaaaaattgggggggggggnttttnttttttntgnnnntnngannncnnnnnnnnnggnnnnnntgnnnttnnnnnnnnnncncccccccccaaaannaanccnnnngnnannnnnccccnnngngnntaaaaanaanggncncnccc

SEQ ID NO: 1000 - DNA, 1408 bp, Homo Sapiens
  misc_feature (861)..(861): n is a, c, g, or t
  misc_feature (863)..(863): n is a, c, g, or t
  misc_feature (953)..(953): n is a, c, g, or t
  misc_feature (956)..(956): n is a, c, g, or t
  misc_feature (961)..(961): n is a, c, g, or t
  misc_feature (966)..(966): n is a, c, g, or t
  misc_feature (975)..(975): n is a, c, g, or t
  misc_feature (984)..(985): n is a, c, g, or t
  misc_feature (987)..(987): n is a, c, g, or t
  misc_feature (1012)..(1013): n is a, c, g, or t
  misc_feature (1039)..(1039): n is a, c, g, or t
  misc_feature (1055)..(1055): n is a, c, g, or t
  misc_feature (1068)..(1068): n is a, c, g, or t
  misc_feature (1070)..(1070): n is a, c, g, or t
  misc_feature (1077)..(1077): n is a, c, g, or t
  misc_feature (1085)..(1085): n is a, c, g, or t
  misc_feature (1089)..(1089): n is a, c, g, or t
  misc_feature (1100)..(1100): n is a, c, g, or t
  misc_feature (1105)..(1106): n is a, c, g, or t
  misc_feature (1117)..(1117): n is a, c, g, or t
  misc_feature (1127)..(1128): n is a, c, g, or t
  misc_feature (1132)..(1132): n is a, c, g, or t
  misc_feature (1162)..(1162): n is a, c, g, or t
  misc_feature (1172)..(1172): n is a, c, g, or t
  misc_feature (1175)..(1175): n is a, c, g, or t
  misc_feature (1203)..(1203): n is a, c, g, or t
  misc_feature (1206)..(1206): n is a, c, g, or t
  misc_feature (1216)..(1216): n is a, c, g, or t
  misc_feature (1218)..(1218): n is a, c, g, or t
  misc_feature (1225)..(1225): n is a, c, g, or t
  misc_feature (1229)..(1230): n is a, c, g, or t
  misc_feature (1234)..(1235): n is a, c, g, or t
  misc_feature (1244)..(1245): n is a, c, g, or t
  misc_feature (1251)..(1251): n is a, c, g, or t
  misc_feature (1259)..(1259): n is a, c, g, or t
  misc_feature (1264)..(1264): n is a, c, g, or t
  misc_feature (1272)..(1272): n is a, c, g, or t
  misc_feature (1274)..(1276): n is a, c, g, or t
  misc_feature (1283)..(1284): n is a, c, g, or t
  misc_feature (1297)..(1298): n is a, c, g, or t
  misc_feature (1306)..(1306): n is a, c, g, or t
  misc_feature (1309)..(1310): n is a, c, g, or t
  misc_feature (1324)..(1324): n is a, c, g, or t
  misc_feature (1330)..(1331): n is a, c, g, or t
  misc_feature (1333)..(1333): n is a, c, g, or t
  misc_feature (1335)..(1340): n is a, c, g, or t
  misc_feature (1342)..(1342): n is a, c, g, or t
  misc_feature (1347)..(1347): n is a, c, g, or t
  misc_feature (1350)..(1350): n is a, c, g, or t
  misc_feature (1354)..(1355): n is a, c, g, or t
  misc_feature (1359)..(1359): n is a, c, g, or t
  misc_feature (1361)..(1363): n is a, c, g, or t
  misc_feature (1367)..(1368): n is a, c, g, or t
  misc_feature (1371)..(1373): n is a, c, g, or t
  misc_feature (1380)..(1380): n is a, c, g, or t
  misc_feature (1382)..(1384): n is a, c, g, or t
  misc_feature (1398)..(1398): n is a, c, g, or t
  misc_feature (1400)..(1400): n is a, c, g, or t
  misc_feature (1404)..(1405): n is a, c, g, or t
  misc_feature (1407)..(1407): n is a, c, g, or t
tagagaaattactatgagaggatcgcatcaccatcaccatcacggatcctatttaggtgacactatagaatcgtcgacccacgcgtccgaggaaacagacacggacttagaggtggtgttggaaaaaaaaggcaacatggatgaggcgcacatagaccaggtgaggcgaaaggccttgcaagaagagatcgatcgcgagtcaggcaaaacggaagcttctgaaaccaggaagtggacgggaacccagtttggccagtgggatactgctggttttgagaacgaggaccaaaaactgaaatttctcagacttatgggtggcttcaaaaacctgtccccttcgttcagccgccccgccagcacgattgcaaggcccaacatggccctcggcaagaaggcggctgacagcctgcagcagaatctgcagcgggactacgaccgggccatgagctggaagtacagccggggagccggcctcggcttctccaccgcccccaacaagatcttttacattgacaggaacgcttccaagtcagtcaagctggaagattaaactctagagttttgtccccccaaaactgccacaattgctttgattattccatttatgctggagattacaaattttttttgtgaaaaaatcagatcttggtgaggacctcgagcagtaagatataaataactcccataagcttagcgttccagtaatggaacactaggcataaatggtttattcagttgtgcaaatgaaagccatctgacagttggctcacattgaacacctgtggagattaaggacgaggacaactatattgatgggcttggatgaactggggcagggcagctcatatttcgggagccagnanaacgagtgagtgctaaaacctcctgttttctgtgtaaaacattccgtccctgtttgaaacatcagtatgtacagttaactttttgttgantgntttancaagntactagggnacatactanngntttcccttaatggatttaatcttcnnaattatgaaaggggggctattattanccccctcttaaaatgnaggcaactgaggntncaggganaaagtaanaaanttgcctggggnccccnncccctaatggnaggggttttnntttntacccaaaccctaattcctattcccccctngaaagtcccnttnagaattcccccaaatccctttgggaatnaantttctttaangnagaaaantttnnaaanntccctttcnnaaaaantggggganggggnaggaaaancnnntcttttnnttttttttttccnnttaaaaanttnnggaaagggtttaantttccnnangnnnnnncncgggnaantccnnaaancnnntttnnggnnnctccccnannnaaattttttttttntnaaanntna

SEQ ID NO: 1001 - DNA, 1200 bp, Homo Sapiens
  misc_feature (3)..(3): n is a, c, g, or t
  misc_feature (5)..(5): n is a, c, g, or t
  misc_feature (777)..(777): n is a, c, g, or t
  misc_feature (889)..(889): n is a, c, g, or t
  misc_feature (906)..(906): n is a, c, g, or t
  misc_feature (916)..(916): n is a, c, g, or t
  misc_feature (920)..(920): n is a, c, g, or t
  misc_feature (933)..(933): n is a, c, g, or t
  misc_feature (937)..(937): n is a, c, g, or t
  misc_feature (942)..(942): n is a, c, g, or t
  misc_feature (945)..(945): n is a, c, g, or t
  misc_feature (955)..(955): n is a, c, g, or t
  misc_feature (968)..(968): n is a, c, g, or t
  misc_feature (989)..(989): n is a, c, g, or t
  misc_feature (999)..(999): n is a, c, g, or t
  misc_feature (1005)..(1005): n is a, c, g, or t
  misc_feature (1009)..(1010): n is a, c, g, or t
  misc_feature (1014)..(1014): n is a, c, g, or t
  misc_feature (1025)..(1025): n is a, c, g, or t
  misc_feature (1037)..(1037): n is a, c, g, or t
  misc_feature (1040)..(1040): n is a, c, g, or t
  misc_feature (1046)..(1046): n is a, c, g, or t
  misc_feature (1054)..(1054): n is a, c, g, or t
  misc_feature (1058)..(1058): n is a, c, g, or t
  misc_feature (1061)..(1061): n is a, c, g, or t
  misc_feature (1071)..(1071): n is a, c, g, or t
  misc_feature (1075)..(1075): n is a, c, g, or t
  misc_feature (1085)..(1085): n is a, c, g, or t
  misc_feature (1088)..(1088): n is a, c, g, or t
  misc_feature (1098)..(1098): n is a, c, g, or t
  misc_feature (1103)..(1103): n is a, c, g, or t
  misc_feature (1107)..(1107): n is a, c, g, or t
  misc_feature (1110)..(1110): n is a, c, g, or t
  misc_feature (1113)..(1113): n is a, c, g, or t
  misc_feature (1120)..(1120): n is a, c, g, or t
  misc_feature (1123)..(1123): n is a, c, g, or t
  misc_feature (1135)..(1135): n is a, c, g, or t
  misc_feature (1142)..(1142): n is a, c, g, or t
  misc_feature (1144)..(1144): n is a, c, g, or t
  misc_feature (1147)..(1147): n is a, c, g, or t
  misc_feature (1154)..(1154): n is a, c, g, or t
  misc_feature (1157)..(1157): n is a, c, g, or t
  misc_feature (1160)..(1161): n is a, c, g, or t
  misc_feature (1167)..(1167): n is a, c, g, or t
  misc_feature (1177)..(1177): n is a, c, g, or t
  misc_feature (1184)..(1184): n is a, c, g, or t
  misc_feature (1196)..(1196): n is a, c, g, or t
agnantagagaaaatactatgagaggatcgcatcaccatcaccatcacggatcctatttaggtgacactatagaatcgtcgacccacgcgtccgctttctcccaccgctttccgagcccgcttgcacctcggcgatccccgactcccttctttatggcgtcgctcctgtgctgtgggccgaagctggccgcctgcggcatcgtcctcagcgcctggggagtgatcatgttgataatgctcggaatatttttcaatgtccattccgctgtgttgattgaggacgttcccttcacggagaaagattttgagaatggcccccagaacatatacaacctttacgagcaagtcagctacaactgtttcatcgctgcaggcctttacctcctcctcggaggcttctctttctgccaagttcggctcaataagcgcaaggaatacatggtgcgctagggccccggcgcgtttccccgctccagcccctcctctatttaaagactccctgcaccgtgtcacccaggtcgcgtcccacccttgccggcgccctctgcgggactgggtttcccgggcgagagactgaatcccttctcccatctctggcatccggcccccgtggagagggctgaggctggggggctgtcccgtatctcaataaagagaatctgctctcttaaaaaaaaaaaaaaaaaaaaaaaagggcggccgctccctatagtgagtcgtattaagcttaattagctgagcttggactcctgttgatagatccagtaatgacctcanaactccatctggatttgttcaaaacgctcggttgccgccgggcgttttttattggtgagaatccaagctagcttggcgagattttcaggagctaaggaagctaaaaatgganaaaaaaaatcactgganaaaccaccgntganatatcccaatggnatcntaaanaanattttgaggnatttcagtcagtngctcaatgtacctataaccanaacggttcanctgganatannggcnttttaaaaacngtaaaaaaaaanaancccaanttttatcnggcnttnattcaaattnttgncccccggaanaangctcatccgnaattnctanggnaangaaaaanggnaactggggaaangggaaangnttncccttgntanccnnttttcnagaaaaaaangaaaagnttttttcccttnggaa

SEQ ID NO: 1002 - DNA, 1406 bp, Homo Sapiens
  misc_feature (597)..(597): n is a, c, g, or t
  misc_feature (620)..(620): n is a, c, g, or t
  misc_feature (626)..(626): n is a, c, g, or t
  misc_feature (654)..(655): n is a, c, g, or t
  misc_feature (660)..(661): n is a, c, g, or t
  misc_feature (677)..(677): n is a, c, g, or t
  misc_feature (710)..(710): n is a, c, g, or t
  misc_feature (713)..(713): n is a, c, g, or t
  misc_feature (723)..(723): n is a, c, g, or t
  misc_feature (738)..(738): n is a, c, g, or t
  misc_feature (742)..(742): n is a, c, g, or t
  misc_feature (749)..(749): n is a, c, g, or t
  misc_feature (754)..(754): n is a, c, g, or t
  misc_feature (760)..(760): n is a, c, g, or t
  misc_feature (762)..(762): n is a, c, g, or t
  misc_feature (771)..(771): n is a, c, g, or t
  misc_feature (779)..(779): n is a, c, g, or t
  misc_feature (782)..(783): n is a, c, g, or t
  misc_feature (786)..(786): n is a, c, g, or t
  misc_feature (795)..(795): n is a, c, g, or t
  misc_feature (800)..(800): n is a, c, g, or t
  misc_feature (802)..(802): n is a, c, g, or t
  misc_feature (815)..(816): n is a, c, g, or t
  misc_feature (818)..(818): n is a, c, g, or t
  misc_feature (822)..(822): n is a, c, g, or t
  misc_feature (824)..(824): n is a, c, g, or t
  misc_feature (840)..(840): n is a, c, g, or t
  misc_feature (843)..(845): n is a, c, g, or t
  misc_feature (853)..(853): n is a, c, g, or t
  misc_feature (855)..(855): n is a, c, g, or t
  misc_feature (857)..(857): n is a, c, g, or t
  misc_feature (863)..(863): n is a, c, g, or t
  misc_feature (867)..(867): n is a, c, g, or t
  misc_feature (870)..(871): n is a, c, g, or t
  misc_feature (877)..(877): n is a, c, g, or t
  misc_feature (883)..(883): n is a, c, g, or t
  misc_feature (886)..(888): n is a, c, g, or t
  misc_feature (890)..(890): n is a, c, g, or t
  misc_feature (896)..(896): n is a, c, g, or t
  misc_feature (898)..(899): n is a, c, g, or t
  misc_feature (904)..(904): n is a, c, g, or t
  misc_feature (906)..(906): n is a, c, g, or t
  misc_feature (911)..(911): n is a, c, g, or t
  misc_feature (919)..(920): n is a, c, g, or t
  misc_feature (923)..(923): n is a, c, g, or t
  misc_feature (926)..(926): n is a, c, g, or t
  misc_feature (930)..(930): n is a, c, g, or t
  misc_feature (933)..(935): n is a, c, g, or t
  misc_feature (939)..(940): n is a, c, g, or t
  misc_feature (944)..(944): n is a, c, g, or t
  misc_feature (947)..(948): n is a, c, g, or t
  misc_feature (952)..(952): n is a, c, g, or t
  misc_feature (954)..(957): n is a, c, g, or t
  misc_feature (960)..(961): n is a, c, g, or t
  misc_feature (964)..(964): n is a, c, g, or t
  misc_feature (968)..(968): n is a, c, g, or t
  misc_feature (973)..(976): n is a, c, g, or t
  misc_feature (978)..(978): n is a, c, g, or t
  misc_feature (981)..(983): n is a, c, g, or t
  misc_feature (986)..(986): n is a, c, g, or t
  misc_feature (990)..(990): n is a, c, g, or t
  misc_feature (992)..(992): n is a, c, g, or t
  misc_feature (1000)..(1000): n is a, c, g, or t
  misc_feature (1002)..(1003): n is a, c, g, or t
  misc_feature (1006)..(1006): n is a, c, g, or t
  misc_feature (1011)..(1011): n is a, c, g, or t
  misc_feature (1022)..(1023): n is a, c, g, or t
  misc_feature (1025)..(1025): n is a, c, g, or t
  misc_feature (1028)..(1028): n is a, c, g, or t
  misc_feature (1032)..(1032): n is a, c, g, or t
  misc_feature (1034)..(1034): n is a, c, g, or t
  misc_feature (1037)..(1037): n is a, c, g, or t
  misc_feature (1039)..(1039): n is a, c, g, or t
  misc_feature (1043)..(1044): n is a, c, g, or t
  misc_feature (1048)..(1049): n is a, c, g, or t
  misc_feature (1051)..(1051): n is a, c, g, or t
  misc_feature (1054)..(1054): n is a, c, g, or t
  misc_feature (1059)..(1059): n is a, c, g, or t
  misc_feature (1065)..(1066): n is a, c, g, or t
  misc_feature (1069)..(1069): n is a, c, g, or t
  misc_feature (1072)..(1072): n is a, c, g, or t
  misc_feature (1074)..(1075): n is a, c, g, or t
  misc_feature (1078)..(1079): n is a, c, g, or t
  misc_feature (1092)..(1092): n is a, c, g, or t
  misc_feature (1095)..(1100): n is a, c, g, or t
  misc_feature (1103)..(1103): n is a, c, g, or t
  misc_feature (1109)..(1109): n is a, c, g, or t
  misc_feature (1111)..(1113): n is a, c, g, or t
  misc_feature (1119)..(1119): n is a, c, g, or t
  misc_feature (1126)..(1126): n is a, c, g, or t
  misc_feature (1128)..(1128): n is a, c, g, or t
  misc_feature (1130)..(1130): n is a, c, g, or t
  misc_feature (1133)..(1133): n is a, c, g, or t
  misc_feature (1135)..(1135): n is a, c, g, or t
  misc_feature (1137)..(1137): n is a, c, g, or t
  misc_feature (1140)..(1140): n is a, c, g, or t
  misc_feature (1142)..(1142): n is a, c, g, or t
  misc_feature (1152)..(1152): n is a, c, g, or t
  misc_feature (1167)..(1167): n is a, c, g, or t
  misc_feature (1171)..(1172): n is a, c, g, or t
  misc_feature (1185)..(1185): n is a, c, g, or t
  misc_feature (1187)..(1188): n is a, c, g, or t
  misc_feature (1194)..(1194): n is a, c, g, or t
  misc_feature (1199)..(1199): n is a, c, g, or t
  misc_feature (1201)..(1201): n is a, c, g, or t
  misc_feature (1203)..(1205): n is a, c, g, or t
  misc_feature (1207)..(1207): n is a, c, g, or t
  misc_feature (1211)..(1211): n is a, c, g, or t
  misc_feature (1216)..(1216): n is a, c, g, or t
  misc_feature (1225)..(1225): n is a, c, g, or t
  misc_feature (1237)..(1237): n is a, c, g, or t
  misc_feature (1241)..(1242): n is a, c, g, or t
  misc_feature (1244)..(1244): n is a, c, g, or t
  misc_feature (1246)..(1246): n is a, c, g, or t
  misc_feature (1254)..(1254): n is a, c, g, or t
  misc_feature (1258)..(1258): n is a, c, g, or t
  misc_feature (1267)..(1267): n is a, c, g, or t
  misc_feature (1270)..(1270): n is a, c, g, or t
  misc_feature (1284)..(1284): n is a, c, g, or t
  misc_feature (1298)..(1299): n is a, c, g, or t
  misc_feature (1302)..(1302): n is a, c, g, or t
  misc_feature (1304)..(1304): n is a, c, g, or t
  misc_feature (1308)..(1308): n is a, c, g, or t
  misc_feature (1327)..(1327): n is a, c, g, or t
  misc_feature (1332)..(1332): n is a, c, g, or t
  misc_feature (1337)..(1337): n is a, c, g, or t
  misc_feature (1340)..(1340): n is a, c, g, or t
  misc_feature (1343)..(1343): n is a, c, g, or t
  misc_feature (1348)..(1348): n is a, c, g, or t
  misc_feature (1350)..(1350): n is a, c, g, or t
  misc_feature (1355)..(1355): n is a, c, g, or t
  misc_feature (1357)..(1357): n is a, c, g, or t
  misc_feature (1361)..(1361): n is a, c, g, or t
  misc_feature (1371)..(1371): n is a, c, g, or t
  misc_feature (1376)..(1376): n is a, c, g, or t
  misc_feature (1381)..(1381): n is a, c, g, or t
  misc_feature (1387)..(1387): n is a, c, g, or t
  misc_feature (1389)..(1389): n is a, c, g, or t
  misc_feature (1399)..(1400): n is a, c, g, or t
  misc_feature (1405)..(1406): n is a, c, g, or t
aaaaatagagaaaatactatgagaggatcgcatcaccatcaccatcacgggatcctatttaggtgacactatagaatcgtcgacccacgcgtccggcgctcaccagcccagcgcctcgggcggtgccgcggcggccccggcagccccgcgcagctgtttcctggggggcgtggcgtcgggggcccgcgcggcgcagtcctccttcagcatcccgaacagcagcagcggtccgcaggactcgcaggactcggtgcacagcagccctgaggatggcggcgacggcggccagcaccggccggtgggcgggagccccggcgggccgcgcctggtgatcggctccttaccagctcacctctcaccgcgcatgtttggagtctccctctgatgccgagcggaggctggactgtacagccaccatctcggctcactgcaacatccctgcctgattctcctgcctcagcctgccgagtgcctgggattgcaggctcgcaccgccacgcctgactggtttttgtattttttggtggagaaggggtttcgccatgttggctgggctggtctccagctcctgaccgcaagtgatctgcccgcctcggnctcccgaggtgccaggattgcanacggantctcgctcactcagatgctcaaatgttnnttcannctggagtgcaatggcntgatctcagctcgctacaacctccacctcccanccncctgccttgncttcccaaagtgctnaaantgtatantctgnccggcngntaccccgtntgggaaangannaancttctctgnctgancncccatccatctgnnangttnangaaacccctcctgccnggnnnccaaaatntnanaatgtntaanaanngccttntggctnggnnnanaaaccncnntatgnanaatanaaaaaatnntcntcntccntgnnncacnnattnttnngatnannnnaannaancccntctgnnnntngtnnnacnaagntnatggaaanannaangaatnccctttttctnnanaancctncnctntnttgnnaaanngnaanaaacntatttnntcntancnnccnnacgtttatataanttnnnnnnaanactttntnnntatatnaaaaaanananatntntnaantntaatcatttnttcttacattaaatnctanntccttttgtgaanannaaaaanttatntntnnnanccanaactnattaaaaanttaaataacccntacnnantnttaaactntttnattgaaaanaanaaatctcaaatacncatattaaaatccnnttntnttantattttatttatattcttnatatnaatantcnttnaacanantaaanantatnacatctattnttatnatcanatattntntttatataannatagnn

SEQ ID NO: 1003 - DNA, 1198 bp, Homo Sapiens
  misc_feature (1)..(1): n is a, c, g, or t
  misc_feature (860)..(860): n is a, c, g, or t
  misc_feature (910)..(910): n is a, c, g, or t
  misc_feature (931)..(931): n is a, c, g, or t
  misc_feature (948)..(948): n is a, c, g, or t
  misc_feature (969)..(969): n is a, c, g, or t
  misc_feature (977)..(977): n is a, c, g, or t
  misc_feature (989)..(989): n is a, c, g, or t
  misc_feature (1004)..(1004): n is a, c, g, or t
  misc_feature (1007)..(1007): n is a, c, g, or t
  misc_feature (1011)..(1011): n is a, c, g, or t
  misc_feature (1014)..(1015): n is a, c, g, or t
  misc_feature (1027)..(1027): n is a, c, g, or t
  misc_feature (1031)..(1031): n is a, c, g, or t
  misc_feature (1052)..(1052): n is a, c, g, or t
  misc_feature (1065)..(1065): n is a, c, g, or t
  misc_feature (1074)..(1074): n is a, c, g, or t
  misc_feature (1097)..(1097): n is a, c, g, or t
  misc_feature (1099)..(1099): n is a, c, g, or t
  misc_feature (1107)..(1107): n is a, c, g, or t
  misc_feature (1115)..(1115): n is a, c, g, or t
  misc_feature (1119)..(1119): n is a, c, g, or t
  misc_feature (1127)..(1127): n is a, c, g, or t
  misc_feature (1129)..(1129): n is a, c, g, or t
  misc_feature (1133)..(1134): n is a, c, g, or t
  misc_feature (1141)..(1141): n is a, c, g, or t
  misc_feature (1144)..(1144): n is a, c, g, or t
  misc_feature (1146)..(1177): n is a, c, g, or t
  misc_feature (1184)..(1184): n is a, c, g, or t
  misc_feature (1187)..(1188): n is a, c, g, or t
  misc_feature (1190)..(1190): n is a, c, g, or t
  misc_feature (1194)..(1194): n is a, c, g, or t
nattagagaaattactatgagaggatcgcatcaccatcaccatcacggatcctatttaggtgacactatagaatcgtcgacccacgcgtccgcccacgcgtccgctccactatggacagagcctccactgagctgctgcctgcccgccacatacccagctgacatgggcaccgcaggagccatgcagctgtgctgggtgatcctgggcttcctcctgttccgaggccacaactcccagcccacaatgacccagacctctagctctcagggaggccttggcggtctaagtctgaccacagagccagtttcttccaacccaggatacatcccttcctcagaggctaacaggccaagccatctgtccagcactggtaccccaggcgcaggtgtccccagcagtggaagagacggaggcacaagcagagacacatttcaaactgttccccccaattcaaccaccatgagcctgagcatgagggaagatgcgaccatcctgcccagccccacgtcagagactgtgctcactgtggctgcatttggtgttatcagcttcattgtcatcctggtggttgtggtgatcatcctagttggtgtggtcagcctgaggttcaagtgtcggaagagcaaggagtctgaagatccccagaaacctgggagttcagggctgtctgaaagctgctccacagccaatggagagaaagacagcatcacccttatctccatgaagaacatcaacatgaataatggcaaacaaagtctctcagcagagaaggttctttaaaagcaactttgggtccccatgagtccaaggatgatgcagctgccctgtgactacaaggaggaagagatggaattagtanaggcaatgaaccacatgtaaattattttattgtttcatgtctgcttctanatctaaaggaacactagcatngccccaaaatctgggancaagctaccaacaggggaaantcttttcntgtatggacagnctgctggggaaaaantgnctgnttnntcccacctcttnaaancccaggaaaaaggaaggtganaaaaaaaaaaacnaggaaaagngatgagggggattgaaactttcnantttggcanaaaaatantttntaagcctngngttnnaaaaaanaanannnnnnnnnnnnnnnnnnnnnnnnnnnnnnnnggggggnccnntncttnaagg

SEQ ID NO: 1004 - DNA, 1200 bp, Homo Sapiens
  misc_feature (511)..(511): n is a, c, g, or t
  misc_feature (518)..(518): n is a, c, g, or t
  misc_feature (533)..(533): n is a, c, g, or t
  misc_feature (538)..(538): n is a, c, g, or t
  misc_feature (546)..(546): n is a, c, g, or t
  misc_feature (555)..(555): n is a, c, g, or t
  misc_feature (557)..(557): n is a, c, g, or t
  misc_feature (564)..(564): n is a, c, g, or t
  misc_feature (572)..(572): n is a, c, g, or t
  misc_feature (582)..(582): n is a, c, g, or t
  misc_feature (601)..(601): n is a, c, g, or t
  misc_feature (612)..(612): n is a, c, g, or t
  misc_feature (631)..(631): n is a, c, g, or t
  misc_feature (634)..(634): n is a, c, g, or t
  misc_feature (655)..(655): n is a, c, g, or t
  misc_feature (696)..(696): n is a, c, g, or t
  misc_feature (716)..(716): n is a, c, g, or t
  misc_feature (739)..(739): n is a, c, g, or t
  misc_feature (742)..(742): n is a, c, g, or t
  misc_feature (763)..(763): n is a, c, g, or t
  misc_feature (768)..(768): n is a, c, g, or t
  misc_feature (809)..(809): n is a, c, g, or t
  misc_feature (822)..(822): n is a, c, g, or t
  misc_feature (833)..(833): n is a, c, g, or t
  misc_feature (844)..(844): n is a, c, g, or t
  misc_feature (849)..(849): n is a, c, g, or t
  misc_feature (872)..(872): n is a, c, g, or t
  misc_feature (885)..(885): n is a, c, g, or t
  misc_feature (888)..(888): n is a, c, g, or t
  misc_feature (892)..(892): n is a, c, g, or t
  misc_feature (895)..(895): n is a, c, g, or t
  misc_feature (909)..(910): n is a, c, g, or t
  misc_feature (913)..(913): n is a, c, g, or t
  misc_feature (915)..(916): n is a, c, g, or t
  misc_feature (941)..(941): n is a, c, g, or t
  misc_feature (956)..(956): n is a, c, g, or t
  misc_feature (958)..(959): n is a, c, g, or t
  misc_feature (970)..(971): n is a, c, g, or t
  misc_feature (973)..(973): n is a, c, g, or t
  misc_feature (984)..(984): n is a, c, g, or t
  misc_feature (987)..(987): n is a, c, g, or t
  misc_feature (991)..(991): n is a, c, g, or t
  misc_feature (994)..(994): n is a, c, g, or t
  misc_feature (1004)..(1004): n is a, c, g, or t
  misc_feature (1009)..(1009): n is a, c, g, or t
  misc_feature (1011)..(1011): n is a, c, g, or t
  misc_feature (1018)..(1018): n is a, c, g, or t
  misc_feature (1028)..(1028): n is a, c, g, or t
  misc_feature (1043)..(1044): n is a, c, g, or t
  misc_feature (1048)..(1048): n is a, c, g, or t
  misc_feature (1051)..(1052): n is a, c, g, or t
  misc_feature (1057)..(1059): n is a, c, g, or t
  misc_feature (1067)..(1067): n is a, c, g, or t
  misc_feature (1075)..(1075): n is a, c, g, or t
  misc_feature (1086)..(1086): n is a, c, g, or t
  misc_feature (1099)..(1100): n is a, c, g, or t
  misc_feature (1120)..(1120): n is a, c, g, or t
  misc_feature (1136)..(1138): n is a, c, g, or t
  misc_feature (1140)..(1140): n is a, c, g, or t
  misc_feature (1146)..(1146): n is a, c, g, or t
  misc_feature (1152)..(1152): n is a, c, g, or t
  misc_feature (1158)..(1158): n is a, c, g, or t
  misc_feature (1168)..(1168): n is a, c, g, or t
  misc_feature (1178)..(1178): n is a, c, g, or t
  misc_feature (1181)..(1182): n is a, c, g, or t
tagagaaattactatgagaggatcgcatcaccatcaccatcacggatcctatttaggtgacactatagaatcgtcgacccacgcgtccgaaaaagaaaaagacaagaaagaagtatggactctaccttcttgcccttgtggagattgggaactgcctgcccttggcctctttcctgtccatcttgtattatgaaaggctgtttctggcacacccgggctcctctgtgtggtttctgggaagtgactgagggtcaggggaatggagcccctctgcagccggccgctggtaccttccctattgaacccttctttaggcttgctcactctttttgatgggtgtctttccaaagctggctggggacctccctgattgagagacatggggccagttctgttgctgtggctacacgggaataataaagcagaagaacacctgaaaaaaaaaaaaaaaaaaaaaaaaaaaaaaaaaaaaaaaaaaaaaaaaaaaaaaagggcggccgctccctatagngagtcgnattaagcttaattanctgancttggacncctgttgananatccagnaatgaccncaaaactccntctggatttgttcaaaacnctcggttgccnccgggcgttttttattggnganaatccaagctagcttggcganattttcaggagctaaggaagctaaaatggaaaaaaaaatcnctggatataccaccgttganatatcccaatggcatcgtaaaanaanattttgaggcatttcagtcanttgcncattgtacctataacccagaccgttcacctggaatattacngccttttttaaanaccgtaaaaanaaaaaaaaccncaaanttttatccggcctttattcccanttcttgccccccnganaaangcncctcccgaatttcnnaangnnaatgaaaaaacggggaactggtganaaggggaaaatgttncnncccttgttaanncntttttccaagnaanaaantgnaaacgttttnctccncncgggaangaaaaacacnaagaatttccggganntttnctnncaaannnttcccaanaaaggggngggttacgggnaaaaacctggccnnatttccccaaaaagggtttnttgaaaaatttttttnnncncccccnatcccngggggnatttcccccntttttatttnaannggggccaaaaggaaaaat
